United States Patent Application Publication US 2024/0141435 A1 - sequence listing, part 2

SEQ ID NO: 9507 - DNA, 122 bp, Homo sapiens
  misc_feature (61)..(62): /note="This region represents a CpG dinucleotide"
  misc_feature (61)..(61): /note="Nucleotide may be methylated to form 5-methylcytosine"
acaatacagatgactcacatatggctcattcaaagccactggcttgtacatggcatttatcgttaatctagccgtgcccccagcatcataaaaagaccccatggaaactcatccatcagatc

SEQ ID NO: 9508 - DNA, 122 bp, Homo sapiens
  misc_feature (61)..(62): /note="This region represents a CpG dinucleotide"
  misc_feature (61)..(61): /note="Nucleotide may be methylated to form 5-methylcytosine"
agggtgttgtattttcagcagatgattcatttcaccagctgccagaaagttgcatgttgccgcacacctggacacatgtatccatgactgattgggaaacacatttatcttggcacatcaca

SEQ ID NO: 9509 - DNA, 122 bp, Homo sapiens
  misc_feature (61)..(62): /note="This region represents a CpG dinucleotide"
  misc_feature (61)..(61): /note="Nucleotide may be methylated to form 5-methylcytosine"
gcctaggaatctgtttttattcagcaccaggtgcttcccatgggcgttgtccaaggattacgctttgggaatcgcaggctacacccagacaacctgtcctggggccgctactccagagttgg

SEQ ID NO: 9510 - DNA, 122 bp, Homo sapiens
  misc_feature (61)..(62): /note="This region represents a CpG dinucleotide"
  misc_feature (61)..(61): /note="Nucleotide may be methylated to form 5-methylcytosine"
tcctgggagatgaaagaacttgctaaaggccagtgtctgtccaggagatgacaatactgccgcttggcaagggcaggttttttgtggagaggtgtaatagggaaaaggtgaagcatggccaa

SEQ ID NO: 9511 - DNA, 122 bp, Homo sapiens
  misc_feature (61)..(62): /note="This region represents a CpG dinucleotide"
  misc_feature (61)..(61): /note="Nucleotide may be methylated to form 5-methylcytosine"
ccagaactgagattggagcatctacttagttccgccacttggtttgtagcctgggcaagtcgctttacctttcttagccatggcttatccatctatacaatagggataagccagttgccaat

SEQ ID NO: 9512 - DNA, 122 bp, Homo sapiens
  misc_feature (61)..(62): /note="This region represents a CpG dinucleotide"
  misc_feature (61)..(61): /note="Nucleotide may be methylated to form 5-methylcytosine"
caagagcaagagagaggactcaccagagacagtaatagcaaaacagaaggcacagtctttcgtaatccaatcacagatgtgacatcccatcactgttgccacatcctgtgagttagaagtaa

SEQ ID NO: 9513 - DNA, 122 bp, Homo sapiens
  misc_feature (61)..(62): /note="This region represents a CpG dinucleotide"
  misc_feature (61)..(61): /note="Nucleotide may be methylated to form 5-methylcytosine"
ccatgttcagttggagtccagcttcgtactacaaatgagtgccataaaacctactatactcgtcacacaggttttaagactttgcaagaattgtcatcaaatgatatgcttttacttcaact

SEQ ID NO: 9514 - DNA, 122 bp, Homo sapiens
  misc_feature (61)..(62): /note="This region represents a CpG dinucleotide"
  misc_feature (61)..(61): /note="Nucleotide may be methylated to form 5-methylcytosine"
tgcatgccaggcattgtgctgggcaccagggagacagcagtgaccatgtcagataaagcccgtgaggccatggagtttacagtctagtgagagaagggtaaacagtgaaataaaacaataaa

SEQ ID NO: 9515 - DNA, 122 bp, Homo sapiens
  misc_feature (61)..(62): /note="This region represents a CpG dinucleotide"
  misc_feature (61)..(61): /note="Nucleotide may be methylated to form 5-methylcytosine"
taagctacatcctaaaataacccagagtactatgaccctgtgcatcacattagactcatacgactcatactcttttcccttcccatccctcctgtaatctcaggactcagccaagctcactg

SEQ ID NO: 9516 - DNA, 122 bp, Homo sapiens
  misc_feature (61)..(62): /note="This region represents a CpG dinucleotide"
  misc_feature (61)..(61): /note="Nucleotide may be methylated to form 5-methylcytosine"
gccccatgagtccagcatcagagcctggtctctccatctaagaaggctgccatgagatagcggtcaggacagcaatggcaggtagcccagcatcaaggacagatgagtcaaacctcttctgt

SEQ ID NO: 9517 - DNA, 122 bp, Homo sapiens
  misc_feature (61)..(62): /note="This region represents a CpG dinucleotide"
  misc_feature (61)..(61): /note="Nucleotide may be methylated to form 5-methylcytosine"
caactagcagtgacggacacaaactcgatatataactgggaatcctgatgggcttcaaaccgcctggtttccaccacccccttcccttagggaagcctcctgggccacaccctaggccaccc

SEQ ID NO: 9518 - DNA, 122 bp, Homo sapiens
  misc_feature (61)..(62): /note="This region represents a CpG dinucleotide"
  misc_feature (61)..(61): /note="Nucleotide may be methylated to form 5-methylcytosine"
gtaatttccattctattatattacaattattaagtttataccatttatagtggttagtgccgtgcagatggagcaatgactaagacatcattcctgttctttaatgactcatagatcagagc

SEQ ID NO: 9519 - DNA, 122 bp, Homo sapiens
  misc_feature (61)..(62): /note="This region represents a CpG dinucleotide"
  misc_feature (61)..(61): /note="Nucleotide may be methylated to form 5-methylcytosine"
ggggccatgtcagtggctgacggtcacaggtcaggaagccagtgcggcctcctagtagcccgggctctgccaggtggggcgggaggcttctgatgctcaccttggcagacaggcacccccca

SEQ ID NO: 9520 - DNA, 122 bp, Homo sapiens
  misc_feature (61)..(62): /note="This region represents a CpG dinucleotide"
  misc_feature (61)..(61): /note="Nucleotide may be methylated to form 5-methylcytosine"
ttccggtgcaactggattcaggaactcaaacaatgtcatcagaaatctgtctatctctatcgcttggatctgatttccttgtgtttgctcaaatctcaagcaggtaaatatgccacagcagc

SEQ ID NO: 9521 - DNA, 122 bp, Homo sapiens
  misc_feature (61)..(62): /note="This region represents a CpG dinucleotide"
  misc_feature (61)..(61): /note="Nucleotide may be methylated to form 5-methylcytosine"
gcttttcagagacaagtcttggtctttgtgctggacggaggcaatgctgctaatgggaggcggagcccacctgctcctcagccaggccgcagggagaggcaggcagcggtgaaagccgctga

SEQ ID NO: 9522 - DNA, 122 bp, Homo sapiens
  misc_feature (61)..(62): /note="This region represents a CpG dinucleotide"
  misc_feature (61)..(61): /note="Nucleotide may be methylated to form 5-methylcytosine"
tgatgatctttcttttctcattcctgccaccctcggatgttgaaatgcctgtgactctagcggtaaaattgcttattagtcaatgcttggctcagattagtttttatggtccaagtagtggg

SEQ ID NO: 9523 - DNA, 122 bp, Homo sapiens
  misc_feature (61)..(62): /note="This region represents a CpG dinucleotide"
  misc_feature (61)..(61): /note="Nucleotide may be methylated to form 5-methylcytosine"
gtgatttcttaaatgaacagaagagcttgagtattaagtgctaagaaggagatgaaggtacgcaatgctgtgagtgcctgtgataaatctgagccttctcagggttaggctgtgcctattga

SEQ ID NO: 9524 - DNA, 122 bp, Homo sapiens
  misc_feature (61)..(62): /note="This region represents a CpG dinucleotide"
  misc_feature (61)..(61): /note="Nucleotide may be methylated to form 5-methylcytosine"
tgtacattagccagcgtatttcacttagtgctgctcagcagcaagcttggaattcccagccgcttcctggacattgcataagtgtctcacaggtgcttaaaacactgctgtacccaggattt

SEQ ID NO: 9525 - DNA, 122 bp, Homo sapiens
  misc_feature (61)..(62): /note="This region represents a CpG dinucleotide"
  misc_feature (61)..(61): /note="Nucleotide may be methylated to form 5-methylcytosine"
gctactttaaggatatattactttatacattttctgctttcaaaaaaatggcactgggcgcggtgactcacgcctataatcccagcactttgggagcccaaggcgggtggattacttgaggc

SEQ ID NO: 9526 - DNA, 122 bp, Homo sapiens
  misc_feature (61)..(62): /note="This region represents a CpG dinucleotide"
  misc_feature (61)..(61): /note="Nucleotide may be methylated to form 5-methylcytosine"
caagggatacacagattcttaatggaagttctttcccactttcagactgctctaggttctcgcctctgactgctaaaatttctctatcacttgttattcttcttggactacattctttaggc

SEQ ID NO: 9527 - DNA, 122 bp, Homo sapiens
  misc_feature (61)..(62): /note="This region represents a CpG dinucleotide"
  misc_feature (61)..(61): /note="Nucleotide may be methylated to form 5-methylcytosine"
atggaggtttttagtggcaaaacataggtacgggcaagaaaaaggctggctgtagatgaacgcctctgaaaaggctatgaaggaagttatccactttaaatacgtgagtgtaaaaaaaatca

SEQ ID NO: 9528 - DNA, 122 bp, Homo sapiens
  misc_feature (61)..(62): /note="This region represents a CpG dinucleotide"
  misc_feature (61)..(61): /note="Nucleotide may be methylated to form 5-methylcytosine"
gggccttgagcactcagctgctgagttgatacctaatcttgtgcaatctggagttggccacgcaggagccacagcaggacagaaaggtcttctaagctcattctttacttcctgacactctc

SEQ ID NO: 9529 - DNA, 122 bp, Homo sapiens
  misc_feature (61)..(62): /note="This region represents a CpG dinucleotide"
  misc_feature (61)..(61): /note="Nucleotide may be methylated to form 5-methylcytosine"
tttatcaaatcacccagtaagtgcaaaatgcagtctctgggtggcgatggagctagtacccgtctcagtgctgaaactgttctcaagttggctcctatgccgtggcttttctgtgtggcttt

SEQ ID NO: 9530 - DNA, 122 bp, Homo sapiens
  misc_feature (61)..(62): /note="This region represents a CpG dinucleotide"
  misc_feature (61)..(61): /note="Nucleotide may be methylated to form 5-methylcytosine"
acgattaaggttgagaagaacatcactggcatggcgggtgaactggatacagctgtcagccggcgaggccattttgtcttcacttgaaaaaagaggccaaaatcctgttagtcctccagaac

SEQ ID NO: 9531 - DNA, 122 bp, Homo sapiens
  misc_feature (61)..(62): /note="This region represents a CpG dinucleotide"
  misc_feature (61)..(61): /note="Nucleotide may be methylated to form 5-methylcytosine"
tggaattatacacagaggatctgttttttaaattataaaagacacagcaatatgtctggacggagatgcaccactcaaggagacagtaaaagggacctgagtccatgttcctatacttaact

SEQ ID NO: 9532 - DNA, 122 bp, Homo sapiens
  misc_feature (61)..(62): /note="This region represents a CpG dinucleotide"
  misc_feature (61)..(61): /note="Nucleotide may be methylated to form 5-methylcytosine"
cgggtccacacgggcggccaagagtgcttgggccgtgctattgggcagcgacaagttttgcgtcaggaaacgccagagctcctgcgggtttctggccaccgagtccagagagaaggaagaca

SEQ ID NO: 9533 - DNA, 122 bp, Homo sapiens
  misc_feature (61)..(62): /note="This region represents a CpG dinucleotide"
  misc_feature (61)..(61): /note="Nucleotide may be methylated to form 5-methylcytosine"
tccagtttcgcaatacaatacttgagctttcgaacacctcagacactagaatgtgtaatgcgagtcaaaaaagctgacatacaaaacaattcccatttggctcagggttcctaaatgtcaca

SEQ ID NO: 9534 - DNA, 122 bp, Homo sapiens
  misc_feature (61)..(62): /note="This region represents a CpG dinucleotide"
  misc_feature (61)..(61): /note="Nucleotide may be methylated to form 5-methylcytosine"
tggtatttccttactatccttctagagttgggagaatatgattaatcaaacctgacctgacgaccatgagttttcagagtggttccataggagcttagtgaacctgcatcataggtagaaag

SEQ ID NO: 9535 - DNA, 122 bp, Homo sapiens
  misc_feature (61)..(62): /note="This region represents a CpG dinucleotide"
  misc_feature (61)..(61): /note="Nucleotide may be methylated to form 5-methylcytosine"
gatttcagggacctgatgagacaatatggtggtgaaaacagactgctggattgcaatgggcggaactgggcttagtctctggataggtgtcagttcatttcacacctgtcattgagggaaaa

SEQ ID NO: 9536 - DNA, 122 bp, Homo sapiens
  misc_feature (61)..(62): /note="This region represents a CpG dinucleotide"
  misc_feature (61)..(61): /note="Nucleotide may be methylated to form 5-methylcytosine"
cataacgaagaccacacccagatcactgggtgcttcacttgaaccagcctccaaaacatccggcagcaggccagagacacacttcttgtttaaacacagagaaatgagacagccccaggtct

SEQ ID NO: 9537 - DNA, 122 bp, Homo sapiens
  misc_feature (61)..(62): /note="This region represents a CpG dinucleotide"
  misc_feature (61)..(61): /note="Nucleotide may be methylated to form 5-methylcytosine"
actgaaggttccttgggtttgtgttttctctggaaaaaatttttcgtgaaacctgatgtacgtatactgcactgatgtagcctgcctgacactgtaagagattttggaaccatactcaacct

SEQ ID NO: 9538 - DNA, 122 bp, Homo sapiens
  misc_feature (61)..(62): /note="This region represents a CpG dinucleotide"
  misc_feature (61)..(61): /note="Nucleotide may be methylated to form 5-methylcytosine"
tgattgtgacagaacactcacagccatatacccaagggccaaatggcaagattaaaagttcgtgtcactaatgccaacagacacacagtcatacaaagactaacatgttcacacatagacac

SEQ ID NO: 9539 - DNA, 122 bp, Homo sapiens
  misc_feature (61)..(62): /note="This region represents a CpG dinucleotide"
  misc_feature (61)..(61): /note="Nucleotide may be methylated to form 5-methylcytosine"
tggtggattggagaggatgtcctgagggccagacaccagccagggcggggttgggtgacccgtggggtttattctgtgatgtcacaacggcagtcaggggtctccctgttgctccctcagcc

SEQ ID NO: 9540 - DNA, 122 bp, Homo sapiens
  misc_feature (61)..(62): /note="This region represents a CpG dinucleotide"
  misc_feature (61)..(61): /note="Nucleotide may be methylated to form 5-methylcytosine"
ggcagttggcccaacacattccccacccctttgagaggtctgaggcctgcagacctggctcggagcccacctggtagtcctcagactgtgtgtgtgtgtgtgtgtgtgtgtgtgtgtgtgtg

SEQ ID NO: 9541 - DNA, 122 bp, Homo sapiens
  misc_feature (61)..(62): /note="This region represents a CpG dinucleotide"
  misc_feature (61)..(61): /note="Nucleotide may be methylated to form 5-methylcytosine"
ttcagcagtttccttagaaccattgccaattgaaagaaccttgttcatcctgagagtcagcggaaaccctgtcattaatgagaggaactggaaagttgccttctatactgtgtaacagaacc

SEQ ID NO: 9542 - DNA, 122 bp, Homo sapiens
  misc_feature (61)..(62): /note="This region represents a CpG dinucleotide"
  misc_feature (61)..(61): /note="Nucleotide may be methylated to form 5-methylcytosine"
aaagaatgagcctggtcaacaggaaatgtacatcagtgtgcaaaagtgacaatattaatacgacagctaacatttgagcagtaattctgtgccaggcactatgctgagggccttacatgcat

SEQ ID NO: 9543 - DNA, 122 bp, Homo sapiens
  misc_feature (61)..(62): /note="This region represents a CpG dinucleotide"
  misc_feature (61)..(61): /note="Nucleotide may be methylated to form 5-methylcytosine"
agaatgtgtttttctcctgtgatattcagctggataaacaaaatatgataggaaggaagtcgggtttaatcaggactgtagttatgccaagtgaattcaaaaagtgggatatgggagtcaag

SEQ ID NO: 9544 - DNA, 122 bp, Homo sapiens
  misc_feature (61)..(62): /note="This region represents a CpG dinucleotide"
  misc_feature (61)..(61): /note="Nucleotide may be methylated to form 5-methylcytosine"
aatttttgccctttaaacatgtaaagctttatttactgtgggcctgtactgtgttggtggcgatttaaagatggaagggtggtgttcctgcccttagggattctcagcccatatagaagctg

SEQ ID NO: 9545 - DNA, 122 bp, Homo sapiens
  misc_feature (61)..(62): /note="This region represents a CpG dinucleotide"
  misc_feature (61)..(61): /note="Nucleotide may be methylated to form 5-methylcytosine"
aaaagtacagtcaaggccttgtactgcctggatcctatactcaaaaagttaattctatctcgcaatatatatttaatacaattcagttaagcttcctctaaataattcatttagtttagttt

SEQ ID NO: 9546 - DNA, 122 bp, Homo sapiens
  misc_feature (61)..(62): /note="This region represents a CpG dinucleotide"
  misc_feature (61)..(61): /note="Nucleotide may be methylated to form 5-methylcytosine"
gtcacaagacaatgccccattgtgcttgcttatccagaagatcaatcaggaagagaagcacgccatgggctgaactgcagtttctgttacctgacttagtttagatgtatttctcctctccc

SEQ ID NO: 9547 - DNA, 122 bp, Homo sapiens
  misc_feature (61)..(62): /note="This region represents a CpG dinucleotide"
  misc_feature (61)..(61): /note="Nucleotide may be methylated to form 5-methylcytosine"
catttttcacctgctgactaaatatccctcgggccctgaataatcagcagcatggctgggcgcggtggctcatgcctgtaatcccagcactttgggaggccgaggtgggtggatcacttgag

SEQ ID NO: 9548 - DNA, 122 bp, Homo sapiens
  misc_feature (61)..(62): /note="This region represents a CpG dinucleotide"
  misc_feature (61)..(61): /note="Nucleotide may be methylated to form 5-methylcytosine"
agtggtggtgaatgaggcacaggaactgtgccccgatgatgacaatgatggtaatgacagcggctaccattgagcacctcctatgtgttaggcacagtactggggactttacatttgttatc

SEQ ID NO: 9549 - DNA, 122 bp, Homo sapiens
  misc_feature (61)..(62): /note="This region represents a CpG dinucleotide"
  misc_feature (61)..(61): /note="Nucleotide may be methylated to form 5-methylcytosine"
actctaggccagtcatttctggttcctcctgctatgtctcatccagcatatcccagatgacgtgcaggaggttctaaagtaagaaaaaaaaaacctggccaggcacggtggctcaagccttt

SEQ ID NO: 9550 - DNA, 122 bp, Homo sapiens
  misc_feature (61)..(62): /note="This region represents a CpG dinucleotide"
  misc_feature (61)..(61): /note="Nucleotide may be methylated to form 5-methylcytosine"
tcctacaaattaacttaagacctaaatcaaggtctaacttttgcttgtccaagtgccagccggaagaacagctccgtgaagccagctaaccaaccaaccaaaaccctgctgctgccccaggg

SEQ ID NO: 9551 - DNA, 122 bp, Homo sapiens
  misc_feature (61)..(62): /note="This region represents a CpG dinucleotide"
  misc_feature (61)..(61): /note="Nucleotide may be methylated to form 5-methylcytosine"
ctatattataggagcttagaatcccagctgctggctctgggctgaagttctctgatggctcgtgcagggtggactggcctccttcccctatatgtgtgtctactgctgacctgtggctttgc

SEQ ID NO: 9552 - DNA, 122 bp, Homo sapiens
  misc_feature (61)..(62): /note="This region represents a CpG dinucleotide"
  misc_feature (61)..(61): /note="Nucleotide may be methylated to form 5-methylcytosine"
atcgagtgatcctttgcctccctcttctaaaacagcagcatttctgctcagtgttgtactcgaatgtgctgtggactgtgctgaagcctcaacatttctcaatctctacacagaaccctaat

SEQ ID NO: 9553 - DNA, 122 bp, Homo sapiens
  misc_feature (61)..(62): /note="This region represents a CpG dinucleotide"
  misc_feature (61)..(61): /note="Nucleotide may be methylated to form 5-methylcytosine"
gccacacccagggaattatcttgccatgactcagcattagcctttagttaagtattggtgcgtgtgtacatattattattgctatattgtcttaacaaagtagattaaaatggaacagcatc

SEQ ID NO: 9554 - DNA, 122 bp, Homo sapiens
  misc_feature (61)..(62): /note="This region represents a CpG dinucleotide"
  misc_feature (61)..(61): /note="Nucleotide may be methylated to form 5-methylcytosine"
gcaaagttgaggaagtaaaactgggcctggaatccactcgtctgatcccctggcacatgacgcaaggcttgaccttagagggactcgtttccagacagagctctggcaaaggagtgtcttgg

SEQ ID NO: 9555 - DNA, 122 bp, Homo sapiens
  misc_feature (61)..(62): /note="This region represents a CpG dinucleotide"
  misc_feature (61)..(61): /note="Nucleotide may be methylated to form 5-methylcytosine"
taaatttttttgaggccagtaggcattgtctgcgttaggatttctgtatcatcctcctaacgcagacaatgcctactggcctaagaaaaatttaccttcttgtgggtggagacaggacaaga

SEQ ID NO: 9556 - DNA, 122 bp, Homo sapiens
  misc_feature (61)..(62): /note="This region represents a CpG dinucleotide"
  misc_feature (61)..(61): /note="Nucleotide may be methylated to form 5-methylcytosine"
ttttgaatttgcttcagccggaaacctcaagtgcaatcattgggctaaggccaatttttacgtcaatttattagcccagtggataatgtacatttgaatcacaaacctgtatgaggtactag

SEQ ID NO: 9557 - DNA, 122 bp, Homo sapiens
  misc_feature (61)..(62): /note="This region represents a CpG dinucleotide"
  misc_feature (61)..(61): /note="Nucleotide may be methylated to form 5-methylcytosine"
aactgtgaagtacttccattctacttcctggtgatttttagtgacctggtgccatttgaacgtatgtgtcctccaaaattcgtatgttgaaacttaaaccccaaagcaatggtattagaagg

SEQ ID NO: 9558 - DNA, 122 bp, Homo sapiens
  misc_feature (61)..(62): /note="This region represents a CpG dinucleotide"
  misc_feature (61)..(61): /note="Nucleotide may be methylated to form 5-methylcytosine"
cctccgagctcctttgagtggtcaggctgggtgttgggggcctgggagtgaactgccacccggacagccagctacagggtgtgctcagaggcttaaggagacaaatgccaaaaactactggg

SEQ ID NO: 9559 - DNA, 122 bp, Homo sapiens
  misc_feature (61)..(62): /note="This region represents a CpG dinucleotide"
  misc_feature (61)..(61): /note="Nucleotide may be methylated to form 5-methylcytosine"
tgatcctacagacagaaatgtttccttggcagccttgagattcttgccctctctctgttacgtcagtggtggggaacctggggcagattcgcctccgtggcttctcctgcatgactgcgttg

SEQ ID NO: 9560 - DNA, 122 bp, Homo sapiens
  misc_feature (61)..(62): /note="This region represents a CpG dinucleotide"
  misc_feature (61)..(61): /note="Nucleotide may be methylated to form 5-methylcytosine"
cagtttctgaggtgagaggtagagagaattagagatatgactagtagggtctcctaatcacgaaacaaattgcaacctatgccttgtccggtcatctttatatgactgttttctgaaagaga

SEQ ID NO: 9561 - DNA, 122 bp, Homo sapiens
  misc_feature (61)..(62): /note="This region represents a CpG dinucleotide"
  misc_feature (61)..(61): /note="Nucleotide may be methylated to form 5-methylcytosine"
tctcgggccgctcactccggctggcagtggcgggaggcagtgtgtgctgctcgcaccctgcgtttccagttttaggagactgaagcatcccagacagctgttgacaatcaggaagaccctac

SEQ ID NO: 9562 - DNA, 122 bp, Homo sapiens
  misc_feature (61)..(62): /note="This region represents a CpG dinucleotide"
  misc_feature (61)..(61): /note="Nucleotide may be methylated to form 5-methylcytosine"
tgtggccaggctgtaggttgccgaagtcaaagaggaccatgtaggctgtaatgtaattgacgagcaaggcagcagcttcctcaaaggtcatggcctcaggaatcaggaaggtctggaccgag

SEQ ID NO: 9563 - DNA, 122 bp, Homo sapiens
  misc_feature (61)..(62): /note="This region represents a CpG dinucleotide"
  misc_feature (61)..(61): /note="Nucleotide may be methylated to form 5-methylcytosine"
gtctgaactccctaaggtcaacgctcaagggctccgggcaggcgatggaataattaatggcgctatttatgtgcctgtaatgttcagagctgacacctggaagacacggatgaacgctgtca

SEQ ID NO: 9564 - DNA, 122 bp, Homo sapiens
  misc_feature (61)..(62): /note="This region represents a CpG dinucleotide"
  misc_feature (61)..(61): /note="Nucleotide may be methylated to form 5-methylcytosine"
gtgtgtggaagaactgggactgccctaccttacgctaatgctgtgaggattagtaagtgtcggaaaatccctctgcaaatacgaaatgctttgtaaataataacaagctacttgagcagtta

SEQ ID NO: 9565 - DNA, 122 bp, Homo sapiens
  misc_feature (61)..(62): /note="This region represents a CpG dinucleotide"
  misc_feature (61)..(61): /note="Nucleotide may be methylated to form 5-methylcytosine"
agtgctcagatgcttgtgatggcaaagaagagacggccacaggcagggacgaggcaggcgcgaccttgtcatttgcccggcctggaatggcctctctgagaaggtggatttagggagaaaac

SEQ ID NO: 9566 - DNA, 122 bp, Homo sapiens
  misc_feature (61)..(62): /note="This region represents a CpG dinucleotide"
  misc_feature (61)..(61): /note="Nucleotide may be methylated to form 5-methylcytosine"
cctagtaggaacctctttttagcctttttaagggcaaacggcagctgataaagccactcccgtggaggcagaaacatttaagctctagccacagacaggtgataggaatgtcaacctcacct

SEQ ID NO: 9567 - DNA, 122 bp, Homo sapiens
  misc_feature (61)..(62): /note="This region represents a CpG dinucleotide"
  misc_feature (61)..(61): /note="Nucleotide may be methylated to form 5-methylcytosine"
gccctgcttattggcgtctctggaaggagtggctgtggctcgggctctccagataaaccgcgctctaggccgtttcccagataggagcgctataggttttaagaactaaaactttaaaatct

SEQ ID NO: 9568 - DNA, 122 bp, Homo sapiens
  misc_feature (61)..(62): /note="This region represents a CpG dinucleotide"
  misc_feature (61)..(61): /note="Nucleotide may be methylated to form 5-methylcytosine"
agccgttccttcatgggatttgctgctcccttcaccaacaagcgaaaggcttactcggagcgtagaatcatggggtaagcattctctgccttgcatccttgcacctcccttttccctccaaa

SEQ ID NO: 9569 - DNA, 122 bp, Homo sapiens
  misc_feature (61)..(62): /note="This region represents a CpG dinucleotide"
  misc_feature (61)..(61): /note="Nucleotide may be methylated to form 5-methylcytosine"
cagcaaaggctgcaatttatacattagcccagaataatcactctccaggcggagatgacacgcagtgaggcagccagcatttagcgggatcctctgatcacctcaaacctccctggttaagt

SEQ ID NO: 9570 - DNA, 122 bp, Homo sapiens
  misc_feature (61)..(62): /note="This region represents a CpG dinucleotide"
  misc_feature (61)..(61): /note="Nucleotide may be methylated to form 5-methylcytosine"
tgggtcccgcccctcggactttgatcactgcggcaggagtccggatatcgaattgaaccgcggcaccctggtgatactttcgcgtgtgagtgccgccctacgtgggccgggttctaactcga

SEQ ID NO: 9571 - DNA, 122 bp, Homo sapiens
  misc_feature (61)..(62): /note="This region represents a CpG dinucleotide"
  misc_feature (61)..(61): /note="Nucleotide may be methylated to form 5-methylcytosine"
agtcacttaacttctctagatgccaatctccttctcaataaagaaatcattggccgggtacggtggctcatgcctgtaatcccagcactttgggagcctgaggcaggcagatcacttgaggc

SEQ ID NO: 9572 - DNA, 122 bp, Homo sapiens
  misc_feature (61)..(62): /note="This region represents a CpG dinucleotide"
  misc_feature (61)..(61): /note="Nucleotide may be methylated to form 5-methylcytosine"
tacgtgctctctttcaaaatgccctgggctaactggacttggcagcacaggttgctagagcgtgtaccaccctgagtcaagaggctcactgtccccaccctacacaagtcacttaacctctc

SEQ ID NO: 9573 - DNA, 122 bp, Homo sapiens
  misc_feature (61)..(62): /note="This region represents a CpG dinucleotide"
  misc_feature (61)..(61): /note="Nucleotide may be methylated to form 5-methylcytosine"
tgactaactcccacacatcagccttatagcttccatgattcaaatccatactgagtgcttcgtataatcagctcatttaatcctcccagcagccctgtgaggcagttgatataccatggacc

SEQ ID NO: 9574 - DNA, 122 bp, Homo sapiens
  misc_feature (61)..(62): /note="This region represents a CpG dinucleotide"
  misc_feature (61)..(61): /note="Nucleotide may be methylated to form 5-methylcytosine"
gacacttttatatagttctagtggaattattttgcatgttgtaacaagaagcatatattgcgttgtaattttcttgcatggtacaagttgatgtaagaggacagcagccctctgtatccttg

SEQ ID NO: 9575 - DNA, 122 bp, Homo sapiens
  misc_feature (61)..(62): /note="This region represents a CpG dinucleotide"
  misc_feature (61)..(61): /note="Nucleotide may be methylated to form 5-methylcytosine"
cacggccaaactcatgtacagtaaagaaagatgttcaaatgctgtaatgggtgagaagagcgaactagaacacttggagctggcaccacaccttacttgcaagctgcacagacttgttgcac

SEQ ID NO: 9576 - DNA, 122 bp, Homo sapiens
  misc_feature (61)..(62): /note="This region represents a CpG dinucleotide"
  misc_feature (61)..(61): /note="Nucleotide may be methylated to form 5-methylcytosine"
cagccccagccccagccgagcacccccggccccgcctgcccggcgttcccttttgtgcggcgctctcccgtccgcatccgcccgatcctctggaactccccgcggacgccggggtccctgga

SEQ ID NO: 9577 - DNA, 122 bp, Homo sapiens
  misc_feature (61)..(62): /note="This region represents a CpG dinucleotide"
  misc_feature (61)..(61): /note="Nucleotide may be methylated to form 5-methylcytosine"
ctaacagaaagaagctaatctgggagatcctcttgagtagattagccattccatgcaaaacgtcacagtggcaatcagaaaaggcatctctgaaatgtacaatgaagaaggacgttaaaaga

SEQ ID NO: 9578 - DNA, 122 bp, Homo sapiens
  misc_feature (61)..(62): /note="This region represents a CpG dinucleotide"
  misc_feature (61)..(61): /note="Nucleotide may be methylated to form 5-methylcytosine"
aaacaaccaaatgggataatacactagcacatactttgtgctgtctgaaattaagtagcacggtgtggcaatcaaatgcgcaagacttagccggtttagcaagtatcagaaacttaggtgaa

SEQ ID NO: 9579 - DNA, 122 bp, Homo sapiens
  misc_feature (61)..(62): /note="This region represents a CpG dinucleotide"
  misc_feature (61)..(61): /note="Nucleotide may be methylated to form 5-methylcytosine"
tgggatacattaatcactcctttcatccctcatatgctaatctgatcttttgacatccagcgctggtacctgtgttggacttcggttagtgcttaatcctgagtcccagctaactccaatga

SEQ ID NO: 9580 - DNA, 122 bp, Homo sapiens
  misc_feature (61)..(62): /note="This region represents a CpG dinucleotide"
  misc_feature (61)..(61): /note="Nucleotide may be methylated to form 5-methylcytosine"
cctgctttccttctggacactaaatcattaacgagattccctggtagacaatacttcacacgcttgtcatgatttgatgctaaaggaattaagtgaatctactgtgactcctctgggagagg

SEQ ID NO: 9581 - DNA, 122 bp, Homo sapiens
  misc_feature (61)..(62): /note="This region represents a CpG dinucleotide"
  misc_feature (61)..(61): /note="Nucleotide may be methylated to form 5-methylcytosine"
tttagcccagggccagtgctgctcatctccctgccttatatgcaagcggaaacaggtatacggttccagggcctgcctccaggcagggcttagcattaagccaaccaagcagcaaacccaaa

SEQ ID NO: 9582 - DNA, 122 bp, Homo sapiens
  misc_feature (61)..(62): /note="This region represents a CpG dinucleotide"
  misc_feature (61)..(61): /note="Nucleotide may be methylated to form 5-methylcytosine"
aaaagcccccaggcagaaagcaacagatgttcacattaagcagctttccatgtgcaggggcgaatgccaagggtgatgtgtaagacactggcagcgtcagctgcttccaacccaacccaaat

SEQ ID NO: 9583 - DNA, 122 bp, Homo sapiens
  misc_feature (61)..(62): /note="This region represents a CpG dinucleotide"
  misc_feature (61)..(61): /note="Nucleotide may be methylated to form 5-methylcytosine"
gaccaagagctgttatgactcagtggcaaaaacctgtgcatatagtcaatgagcaacagccgcagtagctaagctagtggaggctttgctgacttgatgttggggtgtcctgtgattttttt

SEQ ID NO: 9584 - DNA, 122 bp, Homo sapiens
  misc_feature (61)..(62): /note="This region represents a CpG dinucleotide"
  misc_feature (61)..(61): /note="Nucleotide may be methylated to form 5-methylcytosine"
ggggtttatactttctccgtgccagaagccacaagcttattctagtggagatagtgtctccgccctccttctttctttttggattttatgtgtggtggattaaaggatcagatacttattcc

SEQ ID NO: 9585 - DNA, 122 bp, Homo sapiens
  misc_feature (61)..(62): /note="This region represents a CpG dinucleotide"
  misc_feature (61)..(61): /note="Nucleotide may be methylated to form 5-methylcytosine"
tcccatccgaacctgcattaggactcaaatcctcggctgatcctggcagggctgggcctccgggcacagattagcacagaaaccccaggaactcaaagcacctgcaggcaaggatcactatg

SEQ ID NO: 9586 - DNA, 122 bp, Homo sapiens
  misc_feature (61)..(62): /note="This region represents a CpG dinucleotide"
  misc_feature (61)..(61): /note="Nucleotide may be methylated to form 5-methylcytosine"
tgctatcagggagggctaagcagggagctgagcctttcattccagacagtcagtaatgaacgcccttcctggccaggcactaaggagccaactctcccctccctttgccactgaggtggtga

SEQ ID NO: 9587 - DNA, 122 bp, Homo sapiens
  misc_feature (61)..(62): /note="This region represents a CpG dinucleotide"
  misc_feature (61)..(61): /note="Nucleotide may be methylated to form 5-methylcytosine"
agctgccctggttcaaaccctgattcaaacccatgctcttggagtaaacatgtaaaacctcgccacaccctccctccaccttccttgccctgcttcagtggccccacccagtgtgttagccc

SEQ ID NO: 9588 - DNA, 122 bp, Homo sapiens
  misc_feature (61)..(62): /note="This region represents a CpG dinucleotide"
  misc_feature (61)..(61): /note="Nucleotide may be methylated to form 5-methylcytosine"
cacagagattgggagatacagaactgacgcatcagaaatgtggtgatgcaggaccatgggcgtgagttaccaaagcccatggccatcagcaggaactgtgaccggccaaacaaagacaaatg

SEQ ID NO: 9589 - DNA, 122 bp, Homo sapiens
  misc_feature (61)..(62): /note="This region represents a CpG dinucleotide"
  misc_feature (61)..(61): /note="Nucleotide may be methylated to form 5-methylcytosine"
gtaagaacgagagcagctgcagtggtgcgctcttgtcaggactcaccacgccaggcaccacggcaggactcaccacgccaggcagccaggccagaactcaccacaccaggaagccaggccag

SEQ ID NO: 9590 - DNA, 122 bp, Homo sapiens
  misc_feature (61)..(62): /note="This region represents a CpG dinucleotide"
  misc_feature (61)..(61): /note="Nucleotide may be methylated to form 5-methylcytosine"
agactacctcatggcagcatgtcacgactaacagatcactccaggcatagtagttctcatcggctcaatgaacagtcacgacatagcagcatcagagatctcagtaataatcccatgactca

SEQ ID NO: 9591 - DNA, 122 bp, Homo sapiens
  misc_feature (61)..(62): /note="This region represents a CpG dinucleotide"
  misc_feature (61)..(61): /note="Nucleotide may be methylated to form 5-methylcytosine"
tcctgcttccagcttttccttacaggtgtggttcccaaatgcagttcccaataaatatcccgcatgcaaaactctcctgcagagtctgtttgcaggaaatccaacctaaggcatcattctga

SEQ ID NO: 9592 - DNA, 122 bp, Homo sapiens
  misc_feature (61)..(62): /note="This region represents a CpG dinucleotide"
  misc_feature (61)..(61): /note="Nucleotide may be methylated to form 5-methylcytosine"
cttattgactatagtgaagttattgaaattattttgatttttgtttttctttggctataacgaagatgtgttaaagtgtaaaaaggaagctgtgaaagagatatcaaaaataggaggaagag

SEQ ID NO: 9593 - DNA, 122 bp, Homo sapiens
  misc_feature (61)..(62): /note="This region represents a CpG dinucleotide"
  misc_feature (61)..(61): /note="Nucleotide may be methylated to form 5-methylcytosine"
aaaggaattcattggcctgcataactaaaaagctcaggctgagtccagggaccttctgtacgtttgtctctctcttctgtatgtctcttctctctgacttcccctgcattggcttcattctc

SEQ ID NO: 9594 - DNA, 122 bp, Homo sapiens
  misc_feature (61)..(62): /note="This region represents a CpG dinucleotide"
  misc_feature (61)..(61): /note="Nucleotide may be methylated to form 5-methylcytosine"
gacttaacttaataattttttacctagcacatcacttatccagtttgaacctcatacatacgaagaaacttgggctcaaataagtgatgtcttttaaggtcattgacagtaatagaaatggg

SEQ ID NO: 9595 - DNA, 122 bp, Homo sapiens
  misc_feature (61)..(62): /note="This region represents a CpG dinucleotide"
  misc_feature (61)..(61): /note="Nucleotide may be methylated to form 5-methylcytosine"
ctttccaaatcccctaagcacacagctggtcaggcctgttaggccaggtgttgctctgcacgtctggccatctttctcgctctctcattccacatagcatggtctggtccaaaggaaaggga

SEQ ID NO: 9596 - DNA, 122 bp, Homo sapiens
  misc_feature (61)..(62): /note="This region represents a CpG dinucleotide"
  misc_feature (61)..(61): /note="Nucleotide may be methylated to form 5-methylcytosine"
ctcttaataccaaagaacaaataagcaggagatttacatgtggctctactggaaaactgccggctcctgtgatttgcttgggattgttctgaatctcagaacctgcccaaaatgaaaaagac

SEQ ID NO: 9597 - DNA, 122 bp, Homo sapiens
  misc_feature (61)..(62): /note="This region represents a CpG dinucleotide"
  misc_feature (61)..(61): /note="Nucleotide may be methylated to form 5-methylcytosine"
acagacagtcacacactaggatttaataagccttgagtactgaacacctacagcaggtcacgcttagtcacaccatgctgagtctgcctttttcctggattcagaagtcacatcagacctga

SEQ ID NO: 9598 - DNA, 122 bp, Homo sapiens
  misc_feature (61)..(62): /note="This region represents a CpG dinucleotide"
  misc_feature (61)..(61): /note="Nucleotide may be methylated to form 5-methylcytosine"
gacaggcagaagtctgagtcagaaattcagctatagaagagcgtgactttcatccctgctcgccctttgaggtatggctggacacagctcagaaaggtcttggatttcaatttgtctaggaa

SEQ ID NO: 9599 - DNA, 122 bp, Homo sapiens
  misc_feature (61)..(62): /note="This region represents a CpG dinucleotide"
  misc_feature (61)..(61): /note="Nucleotide may be methylated to form 5-methylcytosine"
cattgagaaatgcttccatttgagccagtctggctgcttgctactcaggattctcggttgcgtgagaagcaggaaagcagcagattttacccttgttgggaaagaggccctttacgtctttc

SEQ ID NO: 9600 - DNA, 122 bp, Homo sapiens
  misc_feature (61)..(62): /note="This region represents a CpG dinucleotide"
  misc_feature (61)..(61): /note="Nucleotide may be methylated to form 5-methylcytosine"
ctctgagctgccgtactagaatccgctcctgctcaacagcctgacaaaaaatccagactccgagtgtaaaacaggaggggtggtgcaaacacaagatgacacacctcggatgcaccaaacct

SEQ ID NO: 9601 - DNA, 122 bp, Homo sapiens
  misc_feature (61)..(62): /note="This region represents a CpG dinucleotide"
  misc_feature (61)..(61): /note="Nucleotide may be methylated to form 5-methylcytosine"
atcaatttcatggttgtcagcaatgcctaatccatcttccatagtctggaaccactcaggcggcagactcccttgaggtgggagtgctccttgtactcacttgtgttcctgccatcctcggg

SEQ ID NO: 9602 - DNA, 122 bp, Homo sapiens
  misc_feature (61)..(62): /note="This region represents a CpG dinucleotide"
  misc_feature (61)..(61): /note="Nucleotide may be methylated to form 5-methylcytosine"
tcgctctgtgtctcagttcactcacctgtaaaatgagataatgattgtgtctattcatatcgtggcaggtaccatgagtcagtatagggaaagcatttagaatagttcctcgtatctattaa

SEQ ID NO: 9603 - DNA, 122 bp, Homo sapiens
  misc_feature (61)..(62): /note="This region represents a CpG dinucleotide"
  misc_feature (61)..(61): /note="Nucleotide may be methylated to form 5-methylcytosine"
ctgactccatggtgtagtctaggtcatactttatgttgtgaggctgtgactggattatgtcgcacttcatgaaacctaaggcttcctgttcagacctgaaaggcagaaactgtgtctccttc

SEQ ID NO: 9604 - DNA, 122 bp, Homo sapiens
  misc_feature (61)..(62): /note="This region represents a CpG dinucleotide"
  misc_feature (61)..(61): /note="Nucleotide may be methylated to form 5-methylcytosine"
gctccctgcttcacactgtcttcaattctcacaggtctgtgaagaaatccagggactcaacgcagagctaggaatgttcttactggggtgaactttgcctctgtgacaaaaccagtttaact

SEQ ID NO: 9605 - DNA, 122 bp, Homo sapiens
  misc_feature (61)..(62): /note="This region represents a CpG dinucleotide"
  misc_feature (61)..(61): /note="Nucleotide may be methylated to form 5-methylcytosine"
tgttccacccactcgcatatcctgttggcattttcttaatcatactcttgtaatggcaagcggaaagggaatttagcaggggctcaggaaggcacacagttacttcactcttactaactgaa

SEQ ID NO: 9606 - DNA, 122 bp, Homo sapiens
  misc_feature (61)..(62): /note="This region represents a CpG dinucleotide"
  misc_feature (61)..(61): /note="Nucleotide may be methylated to form 5-methylcytosine"
cctccttgccttgtcctccagcctccagccatgcaatggatgcaggtatctggagagagacgagggaagcctggaggtacctactgagcaagctatgcccgtgccctcccacacctcctagt

SEQ ID NO: 9607 - DNA, 122 bp, Homo sapiens
  misc_feature (61)..(62): /note="This region represents a CpG dinucleotide"
  misc_feature (61)..(61): /note="Nucleotide may be methylated to form 5-methylcytosine"
gtggagggcaggcatatttctttcatctattcattcagtcagtcgcttattctttcaacacgtatttattgctgactgtgtgcattgcgcagtgctgagtgagcctggaaatacagcatgca

SEQ ID NO: 9608 - DNA, 122 bp, Homo sapiens
  misc_feature (61)..(62): /note="This region represents a CpG dinucleotide"
  misc_feature (61)..(61): /note="Nucleotide may be methylated to form 5-methylcytosine"
gcaagaacaggcttgcagtcaggttcctaacataaaagtccatctctgcttctctatcttcgtaactcagacaaattaacttacttaaacctcaatttcttttttataaaatgggcaatggc

SEQ ID NO: 9609 - DNA, 122 bp, Homo sapiens
  misc_feature (61)..(62): /note="This region represents a CpG dinucleotide"
  misc_feature (61)..(61): /note="Nucleotide may be methylated to form 5-methylcytosine"
aggcagctggagtgtgaatttccctgagggtttccacttccctgtggttcaggctggggccgtccccgctctcctggccccagagctgccccactaggcagggaaagcctctggaatgaggg

SEQ ID NO: 9610 - DNA, 122 bp, Homo sapiens
  misc_feature (61)..(62): /note="This region represents a CpG dinucleotide"
  misc_feature (61)..(61): /note="Nucleotide may be methylated to form 5-methylcytosine"
cccgcctcagcctcccaaaatgatgggattacaggcatgagccactgcgcccagcctaaccgagtcattattaaaaattaaattataggctgggcaaggtggctcacgcccgtaatcccagt

SEQ ID NO: 9611 - DNA, 122 bp, Homo sapiens
  misc_feature (61)..(62): /note="This region represents a CpG dinucleotide"
  misc_feature (61)..(61): /note="Nucleotide may be methylated to form 5-methylcytosine"
aggatcgcttgagcccaggaggtcacatggtgaccttggaagcaaatgctccctcaaacacgagatgactgcagccctggtctacatctcagttgcagtcttgtgaaatcttgagtcagagg

SEQ ID NO: 9612 - DNA, 122 bp, Homo sapiens
  misc_feature (61)..(62): /note="This region represents a CpG dinucleotide"
  misc_feature (61)..(61): /note="Nucleotide may be methylated to form 5-methylcytosine"
atcctgcctggatcccatgtaatacctgtgggtagggcaaggaagttggagtcctgtgaccgacagtcttgttagagacattattagtatgaccccatcggtggtagctaatgactgagaaa

SEQ ID NO: 9613 - DNA, 122 bp, Homo sapiens
  misc_feature (61)..(62): /note="This region represents a CpG dinucleotide"
  misc_feature (61)..(61): /note="Nucleotide may be methylated to form 5-methylcytosine"
atgactaaagatgaagctgaattatactgcctccagcaccaaagtgttgtgcatatttaccgttcagggtttttgttcatttgtccttttcgtttttgttttttgtttgtttttatttgtcg

SEQ ID NO: 9614 - DNA, 122 bp, Homo sapiens
  misc_feature (61)..(62): /note="This region represents a CpG dinucleotide"
  misc_feature (61)..(61): /note="Nucleotide may be methylated to form 5-methylcytosine"
aagaagacacttagcaaccctaattgcgtttcaaaatgcaattcacattctgaaatcatacgtaagtcttcgcttgtgtatgattttcaaatcaagtgaagacttgtgtatgatttcaaaat

SEQ ID NO: 9615 - DNA, 122 bp, Homo sapiens
  misc_feature (61)..(62): /note="This region represents a CpG dinucleotide"
  misc_feature (61)..(61): /note="Nucleotide may be methylated to form 5-methylcytosine"
acaatttaaaaatatttactgagtatccgccatgagccagacaccatgctaaagacttcacgtaaattatctagatgatgtaatcctcacaacaatacaagcaggaaagtgggtactattat

SEQ ID NO: 9616 - DNA, 122 bp, Homo sapiens
  misc_feature (61)..(62): /note="This region represents a CpG dinucleotide"
  misc_feature (61)..(61): /note="Nucleotide may be methylated to form 5-methylcytosine"
ctaaaagtaggcttagaggccaccacaattacagtatgatacaggaatcaacacctagcacgtgtgtgaccaaagacggacagcctggaaaatgttttccttggcagtgtatcatactagcc

SEQ ID NO: 9617 - DNA, 122 bp, Homo sapiens
  misc_feature (61)..(62): /note="This region represents a CpG dinucleotide"
  misc_feature (61)..(61): /note="Nucleotide may be methylated to form 5-methylcytosine"
cactggcttctgggcgtttactagacacacaatgaactgccaaggactatagaggctgaccgcagggaagagtggctacagaattcttaaaacatgatgctgactccagtctttggtgagac

SEQ ID NO: 9618 - DNA, 122 bp, Homo sapiens
  misc_feature (61)..(62): /note="This region represents a CpG dinucleotide"
  misc_feature (61)..(61): /note="Nucleotide may be methylated to form 5-methylcytosine"
ctatatatatgaaaaataacagtgccaatacctattaatagtaatcccttttagggcaaacgtggactgtagtaagttgtagagcctatgccttatctacagcaagtagctgctattctgtt

SEQ ID NO: 9619 - DNA, 122 bp, Homo sapiens
  misc_feature (61)..(62): /note="This region represents a CpG dinucleotide"
  misc_feature (61)..(61): /note="Nucleotide may be methylated to form 5-methylcytosine"
cctgcgctgtccgagagggatggggtttgacaggtctacacctgcgctgcctgggaggagcggagtttgacacatgtacacctgtgctgtccaagaggagcagggtttgacacgtctacacc

SEQ ID NO: 9620 - DNA, 122 bp, Homo sapiens
  misc_feature (61)..(62): /note="This region represents a CpG dinucleotide"
  misc_feature (61)..(61): /note="Nucleotide may be methylated to form 5-methylcytosine"
cctggcttccagtgctggtcttgctagctgccctgccaggtggacggcttcattagtaagcgtgaaaaattgggagtgccaccatcaggccaggctaaagcaatttggatggctgggaaaag

SEQ ID NO: 9621 - DNA, 122 bp, Homo sapiens
  misc_feature (61)..(62): /note="This region represents a CpG dinucleotide"
  misc_feature (61)..(61): /note="Nucleotide may be methylated to form 5-methylcytosine"
ggaaaaaccctggtgccagtgtaaaaagtgcctccaaagtcaaagcattcctgttagtcccgacacatagagcccatgatttattgtaatttttacttaattctgcctccttctgtaggccc

SEQ ID NO: 9622 - DNA, 122 bp, Homo sapiens
  misc_feature (61)..(62): /note="This region represents a CpG dinucleotide"
  misc_feature (61)..(61): /note="Nucleotide may be methylated to form 5-methylcytosine"
tgtagcctagtgaatcagtgtcagatccaagatttgactccagggagcctgatcccaaagcggttgtctctaaagtctcactgggtctccatcagacctggctgtgtgacccaggataaatt

SEQ ID NO: 9623 - DNA, 122 bp, Homo sapiens
  misc_feature (61)..(62): /note="This region represents a CpG dinucleotide"
  misc_feature (61)..(61): /note="Nucleotide may be methylated to form 5-methylcytosine"
cctttaacttaaaccaaaacaaagacggtaacctttaatactagttagtctatttataaccgttccatctacaaacatttttctaatacaaacatgccctgatagcttatcttggtgcacat

SEQ ID NO: 9624 - DNA, 122 bp, Homo sapiens
  misc_feature (61)..(62): /note="This region represents a CpG dinucleotide"
  misc_feature (61)..(61): /note="Nucleotide may be methylated to form 5-methylcytosine"
caatgaggcagaatcagttcaaaggtcagtctgacccaaaggattcaaatcccatctgtgcgtcacacaaacaaatcattagcaaactgcatccttctgctctgcagctatccagtcttggc

SEQ ID NO: 9625 - DNA, 122 bp, Homo sapiens
  misc_feature (61)..(62): /note="This region represents a CpG dinucleotide"
  misc_feature (61)..(61): /note="Nucleotide may be methylated to form 5-methylcytosine"
caaagttttgagtgattcacccaaagttttgtggctaataaaactccattccagcccaggcgcagtggctcatgcctgtaatcccaacacttcgggaggccgaggcaggcagatcacttgag

SEQ ID NO: 9626 - DNA, 122 bp, Homo sapiens
  misc_feature (61)..(62): /note="This region represents a CpG dinucleotide"
  misc_feature (61)..(61): /note="Nucleotide may be methylated to form 5-methylcytosine"
ttaactagtctcagtgatctcacccacaaagtgtgcataataacatctgcctcactgggccgtcatagagaccagcgagctaatcaggtaaagaagtcagcaggggctagaacagaatgggt

SEQ ID NO: 9627 - DNA, 122 bp, Homo sapiens
  misc_feature (61)..(62): /note="This region represents a CpG dinucleotide"
  misc_feature (61)..(61): /note="Nucleotide may be methylated to form 5-methylcytosine"
agtggtatattctttctgtcatcacttcatagaaggcacgatgactcaggacaggatagacgcaatttgatggacgagagattctggtgaagtctagtgcatacaatgccctgaagatggca

SEQ ID NO: 9628 - DNA, 122 bp, Homo sapiens
  misc_feature (61)..(62): /note="This region represents a CpG dinucleotide"
  misc_feature (61)..(61): /note="Nucleotide may be methylated to form 5-methylcytosine"
ggccaacagcacccacccagtttacgcttgattcgaggaaccttcactcccgaggggcctcgccgaaaagcagctccttcgctcccgaagccgctcccaatcggccaactgacaacccttcc

SEQ ID NO: 9629 - DNA, 122 bp, Homo sapiens
  misc_feature (61)..(62): /note="This region represents a CpG dinucleotide"
  misc_feature (61)..(61): /note="Nucleotide may be methylated to form 5-methylcytosine"
gattacaggcgtgacccactgctcccgacagagtattcattagtttcattgctgtcttttcgtccatgtaagctttgaaacagtgagaagatgcagccctgttgagttggcaactaatgaaa

SEQ ID NO: 9630 - DNA, 122 bp, Homo sapiens
  misc_feature (61)..(62): /note="This region represents a CpG dinucleotide"
  misc_feature (61)..(61): /note="Nucleotide may be methylated to form 5-methylcytosine"
acttgccacagggcatataaactgagaaagttatgtagaaattcaagatcagaggatgagcgcaaggatgatctttgagaacaaaacagtgaacagagccctttgtggtggcaagcagtgac

SEQ ID NO: 9631 - DNA, 122 bp, Homo sapiens
  misc_feature (61)..(62): /note="This region represents a CpG dinucleotide"
  misc_feature (61)..(61): /note="Nucleotide may be methylated to form 5-methylcytosine"
atcccaggacttactctactctgttgtaagcgatttccccacacattgcacatacttaatcgtagaattatgggattccagatttgtttatctctgcaacaaatcagcagtatgactcagaa

SEQ ID NO: 9632 - DNA, 122 bp, Homo sapiens
  misc_feature (61)..(62): /note="This region represents a CpG dinucleotide"
  misc_feature (61)..(61): /note="Nucleotide may be methylated to form 5-methylcytosine"
ccggggtggggcctgagagcctctggagtggggcagggcaaccctgaggtttgggaacaccgtgacctcgcaggacatcaggaggtgcccagggctcacaggcatgactctccagcaccttt

SEQ ID NO: 9633 - DNA, 122 bp, Homo sapiens
  misc_feature (61)..(62): /note="This region represents a CpG dinucleotide"
  misc_feature (61)..(61): /note="Nucleotide may be methylated to form 5-methylcytosine"
agtttgcatgcttgactacccctgctgaggaactgaaatgatatggcttacctaaggccacgtaacatgactaaataaggtaaaatgacacacctaacagggcccaaggtttagtcagagga

SEQ ID NO: 9634 - DNA, 122 bp, Homo sapiens
  misc_feature (61)..(62): /note="This region represents a CpG dinucleotide"
  misc_feature (61)..(61): /note="Nucleotide may be methylated to form 5-methylcytosine"
tgtgctataaagcctgaataaagccttcagactttacccagacaatggtcaaaattgctacgaagctgtttccacctgccttgactccagggaggagcaggaagaggcctccataacttgta

SEQ ID NO: 9635 - DNA, 122 bp, Homo sapiens
  misc_feature (61)..(62): /note="This region represents a CpG dinucleotide"
  misc_feature (61)..(61): /note="Nucleotide may be methylated to form 5-methylcytosine"
ttcactgaggtcttgtgtataagatttaattcctacttacttcatgggagaagtaagatgcgaagctgttattagtcacatttaccttggtgtgaataagtacccagctggcttggagaaag

SEQ ID NO: 9636 - DNA, 122 bp, Homo sapiens
  misc_feature (61)..(62): /note="This region represents a CpG dinucleotide"
  misc_feature (61)..(61): /note="Nucleotide may be methylated to form 5-methylcytosine"
ctgggaattggtccagcctccactctagaaaatgtagctgtttttatccttggtctagatcgctgactcatgtgttctgtctctgggctgactggctcctctttctcaaccagtcctgcctg

SEQ ID NO: 9637 - DNA, 122 bp, Homo sapiens
  misc_feature (61)..(62): /note="This region represents a CpG dinucleotide"
  misc_feature (61)..(61): /note="Nucleotide may be methylated to form 5-methylcytosine"
atgttgttgggaaggagaaaggaaggatttggtaacacaatagcatcctaaactctgaaacggatcgcctgggttcaaacccatgtcttgtcatttaatgacctgagtaagtaagttaacac

SEQ ID NO: 9638 - DNA, 122 bp, Homo sapiens
  misc_feature (61)..(62): /note="This region represents a CpG dinucleotide"
  misc_feature (61)..(61): /note="Nucleotide may be methylated to form 5-methylcytosine"
tttccctgggctgttcccattcttatgatttttcaagagtctaagagattatttgtgccacgcttgggttctttataagctggcttttgtccaggaagcttatgtttgtctctctgagaaga

SEQ ID NO: 9639 - DNA, 122 bp, Homo sapiens
  misc_feature (61)..(62): /note="This region represents a CpG dinucleotide"
  misc_feature (61)..(61): /note="Nucleotide may be methylated to form 5-methylcytosine"
gggcacacctaggtggggcatcccatataaccttttctaggttggccttgcccagtgtgacgtagccagccaggtaacaccagatctgaaatacccatatgtgcagaacccactgaaggggt

SEQ ID NO: 9640 - DNA, 122 bp, Homo sapiens
  misc_feature (61)..(62): /note="This region represents a CpG dinucleotide"
  misc_feature (61)..(61): /note="Nucleotide may be methylated to form 5-methylcytosine"
aagatggagacaggacaaaatgaagaaaggctgtcagatttaaattctataggacagttacgatagagcgatttgactgcaaacaggaactattcttcaagaaaaggaaagaatgacttcaa

SEQ ID NO: 9641 - DNA, 122 bp, Homo sapiens
  misc_feature (61)..(62): /note="This region represents a CpG dinucleotide"
  misc_feature (61)..(61): /note="Nucleotide may be methylated to form 5-methylcytosine"
tggagaagtattctctgctgagaagagattttccatcaggctttacgggaacgcaggtgacgtataccctacagccatggtgctttcctttccggtttcatgcttagcaaagagccctctga

SEQ ID NO: 9642 - DNA, 122 bp, Homo sapiens
  misc_feature (61)..(62): /note="This region represents a CpG dinucleotide"
  misc_feature (61)..(61): /note="Nucleotide may be methylated to form 5-methylcytosine"
atctgtcagttctgatggaatatactaacagtggctgggtttaaatcctggctccagggccgggcacagtggctcatgcctgtaatcccagcactggaaggctgagatgggcggatcatgaa

SEQ ID NO: 9643 - DNA, 122 bp, Homo sapiens
  misc_feature (61)..(62): /note="This region represents a CpG dinucleotide"
  misc_feature (61)..(61): /note="Nucleotide may be methylated to form 5-methylcytosine"
tctcagcctctggagaagaggacagttcttactacacactgacaggtctgatttgaagaacgtgctacaagctctgaagaagaaataccaggtaggaacttggagagctcccaagcctacaa

SEQ ID NO: 9644 - DNA, 122 bp, Homo sapiens
  misc_feature (61)..(62): /note="This region represents a CpG dinucleotide"
  misc_feature (61)..(61): /note="Nucleotide may be methylated to form 5-methylcytosine"
ctctgagccttcggtttccccattttcacatggggataatgacaccttcctagttcctagcgcagtctgaaggattaaagaagctgacgaccttcccacctctggtttcaggccctctaatc

SEQ ID NO: 9645 - DNA, 122 bp, Homo sapiens
  misc_feature (61)..(62): /note="This region represents a CpG dinucleotide"
  misc_feature (61)..(61): /note="Nucleotide may be methylated to form 5-methylcytosine"
gtctggaattctcttttcagattagcaacacagcaacatttgttaatctgaggaaccacccgacacatgtgtctataaaccattacatcaccattgcaataacaacaaaaactgaacttaaa

SEQ ID NO: 9646 - DNA, 122 bp, Homo sapiens
  misc_feature (61)..(62): /note="This region represents a CpG dinucleotide"
  misc_feature (61)..(61): /note="Nucleotide may be methylated to form 5-methylcytosine"
tatggatctgctccttagagctaactttcctgggtaatcaagaccacagggaaacagagacgcagctgagggtgcacagtaagcagccagagcatagaaaacaaagaaggggatgctctgcc

SEQ ID NO: 9647 - DNA, 122 bp, Homo sapiens
  misc_feature (61)..(62): /note="This region represents a CpG dinucleotide"
  misc_feature (61)..(61): /note="Nucleotide may be methylated to form 5-methylcytosine"
aatgagagtagttttaaatttcagaacagcagaaggttctttgaagttggtcactcagcacgtaatgtattgcctttgtatgcagcgagggttcatttattgatatctgatgaaatgctcct

SEQ ID NO: 9648 - DNA, 122 bp, Homo sapiens
  misc_feature (61)..(62): /note="This region represents a CpG dinucleotide"
  misc_feature (61)..(61): /note="Nucleotide may be methylated to form 5-methylcytosine"
tgtagccaggcttcttttaccagggtcgtcatttcagttcctgggtaaacttcagctttacgtgagcccctgccctgctgtgaagcaatttggttcagactcgaccagatgttacagctcca

SEQ ID NO: 9649 - DNA, 122 bp, Homo sapiens
  misc_feature (61)..(62): /note="This region represents a CpG dinucleotide"
  misc_feature (61)..(61): /note="Nucleotide may be methylated to form 5-methylcytosine"
tgtcagtaaaaggaactcaaccgtcaaatgcatagaatgaacatggggtcaactctcctccgtagctctcttccgcatgtgggggaaagggcctagtctaactggcttctgtgatgcagaat

SEQ ID NO: 9650 - DNA, 122 bp, Homo sapiens
  misc_feature (61)..(62): /note="This region represents a CpG dinucleotide"
  misc_feature (61)..(61): /note="Nucleotide may be methylated to form 5-methylcytosine"
caagggaaacacatctctcaaacttaacctgattttcaaactgaattcctgattcccacccgcaaacttgtcactcctcctgtcctcccgatctttgtatcctccacccagctggaatcacc

SEQ ID NO: 9651 - DNA, 122 bp, Homo sapiens
  misc_feature (61)..(62): /note="This region represents a CpG dinucleotide"
  misc_feature (61)..(61): /note="Nucleotide may be methylated to form 5-methylcytosine"
tattattattagctatatgaccttgagcaagtctcttgaactgtctgaacctgttttcctcgtctgtaaaatggggaataccaaggttgctgtgagaattaagtgaacttgtgcatgtaaag

SEQ ID NO: 9652 - DNA, 122 bp, Homo sapiens
  misc_feature (61)..(62): /note="This region represents a CpG dinucleotide"
  misc_feature (61)..(61): /note="Nucleotide may be methylated to form 5-methylcytosine"
ggtctctgctccgcactgcgctggtaagagcctgggaagagatgctgtctgtggtgagcacgtgatagacattccacgacccgacctgtcggtgccctggttctcattgtttcttctcattt

SEQ ID NO: 9653 - DNA, 122 bp, Homo sapiens
  misc_feature (61)..(62): /note="This region represents a CpG dinucleotide"
  misc_feature (61)..(61): /note="Nucleotide may be methylated to form 5-methylcytosine"
caagtgctgctatgcaatgccagcctgggtgattagagtcaaagatgatgagtttggaggcgtgctctccataaatggcttcagcagtgactcactgcatgccccaggggaacattcctgaa

SEQ ID NO: 9654 - DNA, 122 bp, Homo sapiens
  misc_feature (61)..(62): /note="This region represents a CpG dinucleotide"
  misc_feature (61)..(61): /note="Nucleotide may be methylated to form 5-methylcytosine"
tcctgtccatgtagtcacctctgtcaacagcagctgcgatgactcttcttatagaacacacgcagtcaccttcacactgctgagtgtttgttgaatgactgtatgagtgagcaaagaagttt

SEQ ID NO: 9655 - DNA, 122 bp, Homo sapiens
  misc_feature (61)..(62): /note="This region represents a CpG dinucleotide"
  misc_feature (61)..(61): /note="Nucleotide may be methylated to form 5-methylcytosine"
gagggcttgtctgggttctcagcaaagatgccagcacttacagagctttactaggcaaagcgtgatagatgatagattctgtgtttcacccacactgctttgttttcactgctgttttgcaa

SEQ ID NO: 9656 - DNA, 122 bp, Homo sapiens
  misc_feature (61)..(62): /note="This region represents a CpG dinucleotide"
  misc_feature (61)..(61): /note="Nucleotide may be methylated to form 5-methylcytosine"
tccgtagactgacagcaggggtgcgtcacactcaggcgagctcccagccagcaggtaaggcgagtagatggtggccagcccgtgctctgtgtaaaagtgaggcgggtactctgggattgtgg

SEQ ID NO: 9657 - DNA, 122 bp, Homo sapiens
  misc_feature (61)..(62): /note="This region represents a CpG dinucleotide"
  misc_feature (61)..(61): /note="Nucleotide may be methylated to form 5-methylcytosine"
ccaggccagtggttcccaaatgccgatcaaggacagcaagaattactgagttctaaaacccgccagcagatagtctgattcagtggctgaagacattttattttttaaacaagcaactcatc

SEQ ID NO: 9658 - DNA, 122 bp, Homo sapiens
  misc_feature (61)..(62): /note="This region represents a CpG dinucleotide"
  misc_feature (61)..(61): /note="Nucleotide may be methylated to form 5-methylcytosine"
tcaatgaacttgcagagaaagatgtgcaaggatgaagattaattgggagaatatagaaagcggtcaagcaaaaggtggtaagattaactaggatcctaatgaagcatcaataaaaagcgacc

SEQ ID NO: 9659 - DNA, 122 bp, Homo sapiens
  misc_feature (61)..(62): /note="This region represents a CpG dinucleotide"
  misc_feature (61)..(61): /note="Nucleotide may be methylated to form 5-methylcytosine"
ctgtcagatataagccatttgttgggagatattacaaaatatataaatagtgccagcctacgagcaccaggaaaagcattatagcactggcttcttaagtggagaatattacaatctcacgt

SEQ ID NO: 9660 - DNA, 122 bp, Homo sapiens
  misc_feature (61)..(62): /note="This region represents a CpG dinucleotide"
  misc_feature (61)..(61): /note="Nucleotide may be methylated to form 5-methylcytosine"
catcttagcctcagctacagccctgatcacctcagctccactgggcttcacttcactccacgcttctacagctgctcaccaccttgaatgtgccatggcgaaatcttgcctccctgtgtctc

SEQ ID NO: 9661 - DNA, 122 bp, Homo sapiens
  misc_feature (61)..(62): /note="This region represents a CpG dinucleotide"
  misc_feature (61)..(61): /note="Nucleotide may be methylated to form 5-methylcytosine"
tgtaatgctagacgtaataagtagcagtaggctggagagtaggccatgtaaaggaagtcccggttggatggcacttaaggcctaagtgttttgaagcctaggggatctgactaagctgattg

SEQ ID NO: 9662 - DNA, 122 bp, Homo sapiens
  misc_feature (61)..(62): /note="This region represents a CpG dinucleotide"
  misc_feature (61)..(61): /note="Nucleotide may be methylated to form 5-methylcytosine"
catcaattgaccagagttttggggatcttgtttcaagtggttctaatgaaaagcctgtggcggaactgctaccctaccagtcaaccagcatcactcaaaatctggtccaagtcctggtgtgg

SEQ ID NO: 9663 - DNA, 122 bp, Homo sapiens
  misc_feature (61)..(62): /note="This region represents a CpG dinucleotide"
  misc_feature (61)..(61): /note="Nucleotide may be methylated to form 5-methylcytosine"
tccagctagacttcaacctcagcctggtgtttggattctcagtctgtcatctaagagcagcgtgacattgtccttaatttcggagccctggtttccttgtctgaaaaatgtaactaatggct

SEQ ID NO: 9664 - DNA, 122 bp, Homo sapiens
  misc_feature (61)..(62): /note="This region represents a CpG dinucleotide"
  misc_feature (61)..(61): /note="Nucleotide may be methylated to form 5-methylcytosine"
tactcaggtcaaattctggtccaagaggctctgccaggctggctagagcattatgcctgccgactccacacccaggtggcagccaggaacacagtgttcaggttcgtgggccacagaggtta

SEQ ID NO: 9665 - DNA, 122 bp, Homo sapiens
  misc_feature (61)..(62): /note="This region represents a CpG dinucleotide"
  misc_feature (61)..(61): /note="Nucleotide may be methylated to form 5-methylcytosine"
gggattacaggcatgagccactgtgctgggccatggctaatttctgtattcttataaggacggggtttcaccttgttggccaggctggtctctgactcctgacctcagttgatccgcctgcc

SEQ ID NO: 9666 - DNA, 122 bp, Homo sapiens
  misc_feature (61)..(62): /note="This region represents a CpG dinucleotide"
  misc_feature (61)..(61): /note="Nucleotide may be methylated to form 5-methylcytosine"
cccacgactataaatctcatatgtaaacatgatttactattactgctactaaacttgttccgtctttacttgccccctcccacccaccaccccccttaaatataaaattggaaacatttcct

SEQ ID NO: 9667 - DNA, 122 bp, Homo sapiens
  misc_feature (61)..(62): /note="This region represents a CpG dinucleotide"
  misc_feature (61)..(61): /note="Nucleotide may be methylated to form 5-methylcytosine"
gcagacagggacaggtggggcctccgggaaagggctgcggacccgcctgtctgaaggcttcggcactggtgagctgcataagccaacaaggtgtgagaattttacacccgcagaagtgctgc

SEQ ID NO: 9668 - DNA, 122 bp, Homo sapiens
  misc_feature (61)..(62): /note="This region represents a CpG dinucleotide"
  misc_feature (61)..(61): /note="Nucleotide may be methylated to form 5-methylcytosine"
tttgcaccaagcacagaaccaaaaactttcatcaccattatttcatttagtcttctcaaccgcatgaagcagggattcttgatcaaaatatccatttcacaggtgaggaaactgaggctatg

SEQ ID NO: 9669 - DNA, 122 bp, Homo sapiens
  misc_feature (61)..(62): /note="This region represents a CpG dinucleotide"
  misc_feature (61)..(61): /note="Nucleotide may be methylated to form 5-methylcytosine"
gactgtgtctgtcacttggctccagctgacttactctgacgtgcctggagaataagtgtccggcacgtgcagagccaagggagaaggaaacccagaccctgccctcagagctcccaggctgt

SEQ ID NO: 9670 - DNA, 122 bp, Homo sapiens
  misc_feature (61)..(62): /note="This region represents a CpG dinucleotide"
  misc_feature (61)..(61): /note="Nucleotide may be methylated to form 5-methylcytosine"
ggaaggaaggaaggaaggaaggaagaggatatggagtgattcacattcatgtggaatcaacgacacatttatttattgtttgcctcagggctattgtaacacctgtgccctctatagtatag

SEQ ID NO: 9671 - DNA, 122 bp, Homo sapiens
  misc_feature (61)..(62): /note="This region represents a CpG dinucleotide"
  misc_feature (61)..(61): /note="Nucleotide may be methylated to form 5-methylcytosine"
taacttctctatatttgttcctgtgagaagttaagtaggatccctgattttataaatctacgacatggcaaaggctaggtggaaagacaggaacattctgtatatatcttaaagtgtcaggt

SEQ ID NO: 9672 - DNA, 122 bp, Homo sapiens
  misc_feature (61)..(62): /note="This region represents a CpG dinucleotide"
  misc_feature (61)..(61): /note="Nucleotide may be methylated to form 5-methylcytosine"
tccgtgcagtgaagatatattaggcaaatgactgtttcctataatctttccttttttttccgtttcactttatgttttatgtttcctgataaagtagatttgatcatgcaaacacatacaac

SEQ ID NO: 9673 - DNA, 122 bp, Homo sapiens
  misc_feature (61)..(62): /note="This region represents a CpG dinucleotide"
  misc_feature (61)..(61): /note="Nucleotide may be methylated to form 5-methylcytosine"
atcctttacctggtaaatgcctgacatataataggcgctaaatcagccattcagttccttcgtcactgctcccacctgcaggctgagccccatttccaccgtggatttctgactagttccca

SEQ ID NO: 9674 - DNA, 122 bp, Homo sapiens
  misc_feature (61)..(62): /note="This region represents a CpG dinucleotide"
  misc_feature (61)..(61): /note="Nucleotide may be methylated to form 5-methylcytosine"
tgcaaggtggaacaagcccagggttccagtcgtgacctcccgagttattcattcaaaaagcgatttttgagagggcctggggtggtggcttaggcctgtaatcccaggacttgtgggaggcc

SEQ ID NO: 9675 - DNA, 122 bp, Homo sapiens
  misc_feature (61)..(62): /note="This region represents a CpG dinucleotide"
  misc_feature (61)..(61): /note="Nucleotide may be methylated to form 5-methylcytosine"
tgttctccaggcctttctctgcccactcacacccaggaatgtgacctgggaggtatctaacgtgtgatcttccgggcaggtcgggaggttcctcccgccgctgccttcgaggagctgtttat

SEQ ID NO: 9676 - DNA, 122 bp, Homo sapiens
  misc_feature (61)..(62): /note="This region represents a CpG dinucleotide"
  misc_feature (61)..(61): /note="Nucleotide may be methylated to form 5-methylcytosine"
agatgttgtagactgttgctcggtcagtgcaaatgagagctgctagcctcgctgtaacctcgctggctgggtactctcagagattgttaagagttttaaaatttttctaatcactaagcatg

SEQ ID NO: 9677 - DNA, 122 bp, Homo sapiens
  misc_feature (61)..(62): /note="This region represents a CpG dinucleotide"
  misc_feature (61)..(61): /note="Nucleotide may be methylated to form 5-methylcytosine"
ccaaactgtcccctccctggccctttttggtgtaaagggagttcagcaggtgcagctgtgcgccctcaggcttagaggcttagaattctctgcagcacctaaaggccgtgagcttggattca

SEQ ID NO: 9678 - DNA, 122 bp, Homo sapiens
  misc_feature (61)..(62): /note="This region represents a CpG dinucleotide"
  misc_feature (61)..(61): /note="Nucleotide may be methylated to form 5-methylcytosine"
acttctcctggacttgaatgtcaccatagaccttgaatccttgaatgtgaaatggcttcacgctaattgctgtaattgcttgaagatgtgcaggcaggtgaaacctgatccccgtggccatt

SEQ ID NO: 9679 - DNA, 122 bp, Homo sapiens
  misc_feature (61)..(62): /note="This region represents a CpG dinucleotide"
  misc_feature (61)..(61): /note="Nucleotide may be methylated to form 5-methylcytosine"
aacacacacacacacacaaacacacacacacacacacacacacaggcaggacaagaggcacgattccatggagtatgaccagggtggcagcatccacagtgacatctggcaaatggccctgt

SEQ ID NO: 9680 - DNA, 122 bp, Homo sapiens
  misc_feature (61)..(62): /note="This region represents a CpG dinucleotide"
  misc_feature (61)..(61): /note="Nucleotide may be methylated to form 5-methylcytosine"
acagtggcctcagggtgtccagaattcctacgtggggactcagagcaccaacaactaatgcgtcatggtattttatgacctactgacctagcatctcttccactgtgctctactggctgtag

SEQ ID NO: 9681 - DNA, 122 bp, Homo sapiens
  misc_feature (61)..(62): /note="This region represents a CpG dinucleotide"
  misc_feature (61)..(61): /note="Nucleotide may be methylated to form 5-methylcytosine"
agctggtgtgagccgtgtggggccaaggacatgtgggcaaaccgggctggctggtgctggcgacgtgttgacacaggtcctcgcggcatgctggccggatactccacagcctggagcagagg

SEQ ID NO: 9682 - DNA, 122 bp, Homo sapiens
  misc_feature (61)..(62): /note="This region represents a CpG dinucleotide"
  misc_feature (61)..(61): /note="Nucleotide may be methylated to form 5-methylcytosine"
gggaaacctgtcttcctaggttctaaattggtggatgactgtctggtgacggagtccaagcgtcattgcacaatgaagatgaaaaacgcatgttggatggctactccagtgaagttgaaaaa

SEQ ID NO: 9683 - DNA, 122 bp, Homo sapiens
  misc_feature (61)..(62): /note="This region represents a CpG dinucleotide"
  misc_feature (61)..(61): /note="Nucleotide may be methylated to form 5-methylcytosine"
aaagactggtttgccaagcggtttgaggaactgcaaaaggagacgtttaccacagaagagcgaaaacatctgtcgaaactaatgctggaatctcaggtaaaaaggagcatctaggccgggca

SEQ ID NO: 9684 - DNA, 122 bp, Homo sapiens
  misc_feature (61)..(62): /note="This region represents a CpG dinucleotide"
  misc_feature (61)..(61): /note="Nucleotide may be methylated to form 5-methylcytosine"
aaggaaaggcgtttgcacaaggttttgacttgtgcaagggtggccagtcccgagacgggacgcatcagacagggatccctgactcagatcgagggatggcttcagggtgcagtttccttgag

SEQ ID NO: 9685 - DNA, 122 bp, Homo sapiens
  misc_feature (61)..(62): /note="This region represents a CpG dinucleotide"
  misc_feature (61)..(61): /note="Nucleotide may be methylated to form 5-methylcytosine"
gtgctcacagacctgtgcaggcgggaagaggtcagggtggccctcctctgtgcagtcaggcgactccccagctgtgtctcccaagatggcctggggcctctcctgccgcctacagggagggg

SEQ ID NO: 9686 - DNA, 122 bp, Homo sapiens
  misc_feature (61)..(62): /note="This region represents a CpG dinucleotide"
  misc_feature (61)..(61): /note="Nucleotide may be methylated to form 5-methylcytosine"
taaggcctgtgggactcttcctttcctagatgaaaaccttctaactgttgctaatttttccgtaggttgcccatcctcctggctatcctttgttcacgctggtggctaaactggcaattaca

SEQ ID NO: 9687 - DNA, 122 bp, Homo sapiens
  misc_feature (61)..(62): /note="This region represents a CpG dinucleotide"
  misc_feature (61)..(61): /note="Nucleotide may be methylated to form 5-methylcytosine"
acagaaatctctacagaggccactacaaagattaccaagcccagtgtatgtcctcactgtcggaacaatactcattacagtttgcaaatttggacattaaagaaactgtatcatccttgagt

SEQ ID NO: 9688 - DNA, 122 bp, Homo sapiens
  misc_feature (61)..(62): /note="This region represents a CpG dinucleotide"
  misc_feature (61)..(61): /note="Nucleotide may be methylated to form 5-methylcytosine"
cactctgcctccccatcctggggccgagagagcaggtggagttttctttgtagctgggcccggaggtagcggaggtcttgctgatcaagcccgtgagccaggcccaggtagagggtaaggag

SEQ ID NO: 9689 - DNA, 122 bp, Homo sapiens
  misc_feature (61)..(62): /note="This region represents a CpG dinucleotide"
  misc_feature (61)..(61): /note="Nucleotide may be methylated to form 5-methylcytosine"
aaaaaggtcaaacaaagttacttccctttagggagtcctacaacacttgagggcttgttacgcaatgccccagtgggaggattaaggccacacaggctcctcattgcttcacttccaagctt

SEQ ID NO: 9690 - DNA, 122 bp, Homo sapiens
  misc_feature (61)..(62): /note="This region represents a CpG dinucleotide"
  misc_feature (61)..(61): /note="Nucleotide may be methylated to form 5-methylcytosine"
agctggtagtggagactcccttgtttgaagctctgactttttttccagtggcctttaaatcgctcacgtggaatcacacaacatgattaattcacttaacaaactcaatgactcatcatcag

SEQ ID NO: 9691 - DNA, 122 bp, Homo sapiens
  misc_feature (61)..(62): /note="This region represents a CpG dinucleotide"
  misc_feature (61)..(61): /note="Nucleotide may be methylated to form 5-methylcytosine"
ctcttagaacgcatgcagggccctgagctggaaggatcccacagctggtttaatgctctgcgattgtcatcttgcaattcttaataactttagaatgaggccctccctacatgttcattgtg

SEQ ID NO: 9692 - DNA, 122 bp, Homo sapiens
  misc_feature (61)..(62): /note="This region represents a CpG dinucleotide"
  misc_feature (61)..(61): /note="Nucleotide may be methylated to form 5-methylcytosine"
ctcatagcataaatgtctccatacagcaaatgacagagaatttttatctgctgctaataccgccaaatgcaacagaagagtgaaactcagaaaagcctagattagataaagaccgtgacagg

SEQ ID NO: 9693 - DNA, 122 bp, Homo sapiens
  misc_feature (61)..(62): /note="This region represents a CpG dinucleotide"
  misc_feature (61)..(61): /note="Nucleotide may be methylated to form 5-methylcytosine"
ttccaatccaggacagccctggcagcaggaagttcttccttgggtttaatgtgaatctctcgtgctgtcttctaagctattaagataggagaggctctgtcttctatgatctgatgttgctt

SEQ ID NO: 9694 - DNA, 122 bp, Homo sapiens
  misc_feature (61)..(62): /note="This region represents a CpG dinucleotide"
  misc_feature (61)..(61): /note="Nucleotide may be methylated to form 5-methylcytosine"
ccaggcactctacatacatcatctttaatcctcttggccactccctgcagatattactaacgcaaaaaggttaggaacttgccaaggtcagaaagctggtaaatggtacagctcagacataa

SEQ ID NO: 9695 - DNA, 122 bp, Homo sapiens
  misc_feature (61)..(62): /note="This region represents a CpG dinucleotide"
  misc_feature (61)..(61): /note="Nucleotide may be methylated to form 5-methylcytosine"
acaacccttaggaaagagtaggtgtgcacagatgagcataatctgttagttggccactcccgtatctattctaccttttcctcttagtaacagaactctaatttggagttcacacattgcag

SEQ ID NO: 9696 - DNA, 122 bp, Homo sapiens
  misc_feature (61)..(62): /note="This region represents a CpG dinucleotide"
  misc_feature (61)..(61): /note="Nucleotide may be methylated to form 5-methylcytosine"
ttcttcaccattgttgtggtgttagcatgtctggtccaatagcattcagtccacccactacgcatacagacaataaccagagagaaaagcctaaagctggaagtgaatctataaagtctatc

SEQ ID NO: 9697 - DNA, 122 bp, Homo sapiens
  misc_feature (61)..(62): /note="This region represents a CpG dinucleotide"
  misc_feature (61)..(61): /note="Nucleotide may be methylated to form 5-methylcytosine"
ccaagctcatgagcaacagtgctgactcagtcctgcagcatcagttcagtcttggggtgtcgtcattctccaggacatcccaacgagggatatccagcagccttccttgagggtcccaccct

SEQ ID NO: 9698 - DNA, 122 bp, Homo sapiens
  misc_feature (61)..(62): /note="This region represents a CpG dinucleotide"
  misc_feature (61)..(61): /note="Nucleotide may be methylated to form 5-methylcytosine"
cacaagaaggaacaactatttataggaagtattaggaaatctgggcactaccattgattgcggatttaccaagaactgtgctaggcattgtgggagctacctaagaagaataaaacagaatc

SEQ ID NO: 9699 - DNA, 122 bp, Homo sapiens
  misc_feature (61)..(62): /note="This region represents a CpG dinucleotide"
  misc_feature (61)..(61): /note="Nucleotide may be methylated to form 5-methylcytosine"
atattaatcagaaaacatcctatggcaagttccccaagtttttatttgattcattacttccgcccagccctggacttatgtgtctaatactcagtcatagccttgccttcttataaggcaca

SEQ ID NO: 9700 - DNA, 122 bp, Homo sapiens
  misc_feature (61)..(62): /note="This region represents a CpG dinucleotide"
  misc_feature (61)..(61): /note="Nucleotide may be methylated to form 5-methylcytosine"
agagcaggaacaagagagcaaagagggagatgccacatacttttaaacgaccagatctcacgagaactcactcactattgctaaggcagcaccatatggatggtgctaaactattcatgaga

SEQ ID NO: 9701 - DNA, 122 bp, Homo sapiens
  misc_feature (61)..(62): /note="This region represents a CpG dinucleotide"
  misc_feature (61)..(61): /note="Nucleotide may be methylated to form 5-methylcytosine"
aacatggtgagactccatctctacccaaaatacaaaaaataagctgggtgtggtggttcgcgcccgtagtcccagctactggggaggctgaggcaggattgcttgagccccagaaccagagg

SEQ ID NO: 9702 - DNA, 122 bp, Homo sapiens
  misc_feature (61)..(62): /note="This region represents a CpG dinucleotide"
  misc_feature (61)..(61): /note="Nucleotide may be methylated to form 5-methylcytosine"
gaatcagtcacctgttattttatacctgagcttgtggaaacctcctctttgagtcctcatcgtcagatcatgtctcgtcggtccttcatctaaattccttaattaatctcagggattcagct

SEQ ID NO: 9703 - DNA, 122 bp, Homo sapiens
  misc_feature (61)..(62): /note="This region represents a CpG dinucleotide"
  misc_feature (61)..(61): /note="Nucleotide may be methylated to form 5-methylcytosine"
tgttgcccagctgacctgtcaagttgtggttggagacccagagtgacccagcccctacatcgcccatcagacttgttgccctggtctggctggccatttatctggctctgggattaactcta

SEQ ID NO: 9704 - DNA, 122 bp, Homo sapiens
  misc_feature (61)..(62): /note="This region represents a CpG dinucleotide"
  misc_feature (61)..(61): /note="Nucleotide may be methylated to form 5-methylcytosine"
gttttgaatgggtcactgactgttggagtggcagggtcctcctgcccatagataaaatggcgtttctgctggttactgcatcatgcaagaacagccgggtggttgctcaccaaacctgaagg

SEQ ID NO: 9705 - DNA, 122 bp, Homo sapiens
  misc_feature (61)..(62): /note="This region represents a CpG dinucleotide"
  misc_feature (61)..(61): /note="Nucleotide may be methylated to form 5-methylcytosine"
agcctcctgctgtctctggagctggcgtccggcagtgggcagggcctcagcccggaccgtcgggcctcgctgctcacgtctcttatgctggttaagcgcgactaccgctatgatcgggttct

SEQ ID NO: 9706 - DNA, 122 bp, Homo sapiens
  misc_feature (61)..(62): /note="This region represents a CpG dinucleotide"
  misc_feature (61)..(61): /note="Nucleotide may be methylated to form 5-methylcytosine"
agaacagtgtccttggggccagaagaggctgtcccacaagggagaaagccactatctggacgtgtccttgtgcctaacaaaaagccatttgctatgccaagagaacagagcatgcaaactca

SEQ ID NO: 9707 - DNA, 122 bp, Homo sapiens
  misc_feature (61)..(62): /note="This region represents a CpG dinucleotide"
  misc_feature (61)..(61): /note="Nucleotide may be methylated to form 5-methylcytosine"
taacacactggatgaccctggacaagctactgaaacaattcaccaataggttaactcatccgtcaagaaagtaagtggtttctggctgggcgtggtggctcacacctgtaatcccagcactt

SEQ ID NO: 9708 - DNA, 122 bp, Homo sapiens
  misc_feature (61)..(62): /note="This region represents a CpG dinucleotide"
  misc_feature (61)..(61): /note="Nucleotide may be methylated to form 5-methylcytosine"
taatagcaacgtgatctttccagttgctcaggccagaagtaataataagggtgaatgtgacggtgatagagatagtgaagaaacaaattaagccgatgagtaagtatgttataaacaaaggg

SEQ ID NO: 9709 - DNA, 122 bp, Homo sapiens
  misc_feature (61)..(62): /note="This region represents a CpG dinucleotide"
  misc_feature (61)..(61): /note="Nucleotide may be methylated to form 5-methylcytosine"
cactaaaggcaattattagaaagcaggtacctcttccaagctgccctgtttattactttccgtagaaattctcctcaatatatacccaggaccctgactttttgcctgttttggaaaggata

SEQ ID NO: 9710 - DNA, 122 bp, Homo sapiens
  misc_feature (61)..(62): /note="This region represents a CpG dinucleotide"
  misc_feature (61)..(61): /note="Nucleotide may be methylated to form 5-methylcytosine"
attcaaaatgaatgtactttctcctcctcctcacattctgtgaggccattaggcaccaggcgagcagtgcaggctctggaaacaacagaagtgtccctaaaccagtggacaattgaagacac

SEQ ID NO: 9711 - DNA, 122 bp, Homo sapiens
  misc_feature (61)..(62): /note="This region represents a CpG dinucleotide"
  misc_feature (61)..(61): /note="Nucleotide may be methylated to form 5-methylcytosine"
accggcccctagaattagtaagccgatccctgggtacttcctttactcactgtaaagtgacggatctggtgtcaccaggtttacacgttctgagatctgcaccgaccacactatcaggaagg

SEQ ID NO: 9712 - DNA, 122 bp, Homo sapiens
  misc_feature (61)..(62): /note="This region represents a CpG dinucleotide"
  misc_feature (61)..(61): /note="Nucleotide may be methylated to form 5-methylcytosine"
aagctttctttccaccagggaagactgcaaaggccagagatcattttcacaactaaaggtcgtcatctgggcaaatgaaccactctgacttggagattaggggctcagacagccgtggatga

SEQ ID NO: 9713 - DNA, 122 bp, Homo sapiens
  misc_feature (61)..(62): /note="This region represents a CpG dinucleotide"
  misc_feature (61)..(61): /note="Nucleotide may be methylated to form 5-methylcytosine"
actgacctggtggctccacctggagccactgcccgagcctgcgaggtcaccaacagcctccgcaagatttccacacgtgtggctctccactgctcagggggcaggatgtgaagggccaagac

SEQ ID NO: 9714 - DNA, 122 bp, Homo sapiens
  misc_feature (61)..(62): /note="This region represents a CpG dinucleotide"
  misc_feature (61)..(61): /note="Nucleotide may be methylated to form 5-methylcytosine"
ggttttgcaaccacagtgtctaagacaatcagaagggttccagggaggtcttgtctgtagcgatgtgacagatgaggaaactgcagctcagaggacaatgacttgcccacgttgcacagctc

SEQ ID NO: 9715 - DNA, 122 bp, Homo sapiens
  misc_feature (61)..(62): /note="This region represents a CpG dinucleotide"
  misc_feature (61)..(61): /note="Nucleotide may be methylated to form 5-methylcytosine"
tccttgatttctcactccaaataaggtgagccatagagaagaggttggctgatccctcaccggactcaaatggcagttgccattggcctgagaaaggaaaaggcagtgccaagcctaggaaa

SEQ ID NO: 9716 - DNA, 122 bp, Homo sapiens
  misc_feature (61)..(62): /note="This region represents a CpG dinucleotide"
  misc_feature (61)..(61): /note="Nucleotide may be methylated to form 5-methylcytosine"
tattaggggtatttggtattatttggagttatgacattgcctaatagaacttctgctatacgacaagcaaaatcactttctgccttgtgcaataggctgctctctaactagtatctctgctc

SEQ ID NO: 9717 - DNA, 122 bp, Homo sapiens
  misc_feature (61)..(62): /note="This region represents a CpG dinucleotide"
  misc_feature (61)..(61): /note="Nucleotide may be methylated to form 5-methylcytosine"
gtgcaagcaaactgctcccggcacacctggttcatgatggagacatcagctgcatgggtccggtaacagtcgtgcacagagacgaaggtcaggcccttcctgtagcagtgcagggtggtgag

SEQ ID NO: 9718 - DNA, 122 bp, Homo sapiens
  misc_feature (61)..(62): /note="This region represents a CpG dinucleotide"
  misc_feature (61)..(61): /note="Nucleotide may be methylated to form 5-methylcytosine"
tgaaacggaatactgtggccagcaggcagggtgcagtgagctgaaccaagcactagctggcggtccacaagtttgttgccccagggtttccatccacgatgccacaccctgtgactctcaaa

SEQ ID NO: 9719 - DNA, 122 bp, Homo sapiens
  misc_feature (61)..(62): /note="This region represents a CpG dinucleotide"
  misc_feature (61)..(61): /note="Nucleotide may be methylated to form 5-methylcytosine"
ttataacccaagcccatgatccagcaactaagtggtttaattacgcttatcactgccaggcgcctctgtggattaatgtagctaattcaatatcctctctaagaagcgccattggggactgt

SEQ ID NO: 9720 - DNA, 122 bp, Homo sapiens
  misc_feature (61)..(62): /note="This region represents a CpG dinucleotide"
  misc_feature (61)..(61): /note="Nucleotide may be methylated to form 5-methylcytosine"
gtgttcatgcggcatgacacaaacaaagtcgttgttcaatccagcttctatttatttcaacgtctaatgctcttaagagaatgggtggttctctgttattgaaaaaaagtttgtaactgtca

SEQ ID NO: 9721 - DNA, 122 bp, Homo sapiens
  misc_feature (61)..(62): /note="This region represents a CpG dinucleotide"
  misc_feature (61)..(61): /note="Nucleotide may be methylated to form 5-methylcytosine"
aacagagctgttttttacactggctgttaccctgtagatacatgcatggcttgttgtctccgtccagtctttgctttttaaatgtcagtttcttaaaaagatgtgcctattttatttaaaac

SEQ ID NO: 9722 - DNA, 122 bp, Homo sapiens
  misc_feature (61)..(62): /note="This region represents a CpG dinucleotide"
  misc_feature (61)..(61): /note="Nucleotide may be methylated to form 5-methylcytosine"
gagtggctggaacacaaatccacctttccgagcacgacccagtgtgcgttccatcacaaacgctgactgtgagccggagtaaaatgcccctgaggaatccagactcaggaaaaaaacactca

SEQ ID NO: 9723 - DNA, 122 bp, Homo sapiens
  misc_feature (61)..(62): /note="This region represents a CpG dinucleotide"
  misc_feature (61)..(61): /note="Nucleotide may be methylated to form 5-methylcytosine"
aaaggttctttgacttgcttaagtgcttcccagatgtgtccaacatgggcggaggcacatcgtgaggtcctggagtgtgcctgtgattcagcacctgttccctttttggaggacttatttgc

SEQ ID NO: 9724 - DNA, 122 bp, Homo sapiens
  misc_feature (61)..(62): /note="This region represents a CpG dinucleotide"
  misc_feature (61)..(61): /note="Nucleotide may be methylated to form 5-methylcytosine"
tgaattggccttagcttgctcttgcacttgcttacttgcttgcttgcttcttacagagggcggatggaataactcaacattccttccttcctccactgcaacacaagttacataggtgatga

SEQ ID NO: 9725 - DNA, 122 bp, Homo sapiens
  misc_feature (61)..(62): /note="This region represents a CpG dinucleotide"
  misc_feature (61)..(61): /note="Nucleotide may be methylated to form 5-methylcytosine"
cagacaagagcagagctttcaatggacattttaaacacatgggattaagatcctgaagcacgtctttgaagaactataagagaaggtgaaacatggctctaccggtatgactctgaagacaa

SEQ ID NO: 9726 - DNA, 122 bp, Homo sapiens
  misc_feature (61)..(62): /note="This region represents a CpG dinucleotide"
  misc_feature (61)..(61): /note="Nucleotide may be methylated to form 5-methylcytosine"
atttacgcgtctcagccaatttgctggcctagagttacactgtgcagatgctctgccttacggcttgcttttgtctcggaggccgtaagcagatagcataaccctgcttaccattagacatt

SEQ ID NO: 9727 - DNA, 122 bp, Homo sapiens
  misc_feature (61)..(62): /note="This region represents a CpG dinucleotide"
  misc_feature (61)..(61): /note="Nucleotide may be methylated to form 5-methylcytosine"
gctgtgggttcttccctgtaaaacagggccatgaggattggcttcacagagctgttgtaacgaggactccatcaggtgagatgtgggaagcaccagctcagtgcctttctggtgccaagagc

SEQ ID NO: 9728 - DNA, 122 bp, Homo sapiens
  misc_feature (61)..(62): /note="This region represents a CpG dinucleotide"
  misc_feature (61)..(61): /note="Nucleotide may be methylated to form 5-methylcytosine"
tcaaggcatgttccctaaaactagagcacatatctttccagttagcgagtggctgtttaacgcaaggaacatcctgcaatcctatgaaagaggatgcaaaagatatgcaggataccctttat

SEQ ID NO: 9729 - DNA, 122 bp, Homo sapiens
  misc_feature (61)..(62): /note="This region represents a CpG dinucleotide"
  misc_feature (61)..(61): /note="Nucleotide may be methylated to form 5-methylcytosine"
gcaggacagtgacctaaaggaatatatggaccacacccaccattcagcacatagggcttccgtacaagctctttaggcctctcctctatgtccacctccatggccttcacctgcagagaaca

SEQ ID NO: 9730 - DNA, 122 bp, Homo sapiens
  misc_feature (61)..(62): /note="This region represents a CpG dinucleotide"
  misc_feature (61)..(61): /note="Nucleotide may be methylated to form 5-methylcytosine"
gtatattaacaaatgtggcacaagcagaaacattaaaccacacttgagtgattgggcttgcgcccttctgtgctcttgcatcatgtttgggtaagcttggtgaaagatggaaaacactgagt

SEQ ID NO: 9731 - DNA, 122 bp, Homo sapiens
  misc_feature (61)..(62): /note="This region represents a CpG dinucleotide"
  misc_feature (61)..(61): /note="Nucleotide may be methylated to form 5-methylcytosine"
agagtgttgggaagttgtcaagactctgttcttcaagactttgcttggttgtcagctccccggaaactcttggctgactcacctgaggtgaggtccagaccttcctgtgtgctctcacagcc

SEQ ID NO: 9732 - DNA, 122 bp, Homo sapiens
  misc_feature (61)..(62): /note="This region represents a CpG dinucleotide"
  misc_feature (61)..(61): /note="Nucleotide may be methylated to form 5-methylcytosine"
tcacagggtcaggagcaggtcgagaaaagagggaggaggcgagagccaggagacatcagccggcaggtgcccttagaggtttatggctcctttgtgcaagacagcttccccgggaccctcta

SEQ ID NO: 9733 - DNA, 122 bp, Homo sapiens
  misc_feature (61)..(62): /note="This region represents a CpG dinucleotide"
  misc_feature (61)..(61): /note="Nucleotide may be methylated to form 5-methylcytosine"
tggaagtggctgggcccttccctgggaggcctgggctggtttccagcatggcaagtgcagcgctgccaggccagccccgagacaggcccagacacacagcacagactgcagggaacagaggc

SEQ ID NO: 9734 - DNA, 122 bp, Homo sapiens
  misc_feature (61)..(62): /note="This region represents a CpG dinucleotide"
  misc_feature (61)..(61): /note="Nucleotide may be methylated to form 5-methylcytosine"
ctttattgggacaactggcagaactagaattcagtcagagggttgatggtaataacataccgatgttaatttcctgagtctgatggctgtgccggagaatgtcgttgttcataggaaatacc

SEQ ID NO: 9735 - DNA, 122 bp, Homo sapiens
  misc_feature (61)..(62): /note="This region represents a CpG dinucleotide"
  misc_feature (61)..(61): /note="Nucleotide may be methylated to form 5-methylcytosine"
atccacccaccttggcttcacaacgtgctgggattacaggtgtgagccaccacacctggccggcaacacattttttttggctgaatggacatggttattgctgagtaaacgtatggtgtatg

SEQ ID NO: 9736 - DNA, 122 bp, Homo sapiens
  misc_feature (61)..(62): /note="This region represents a CpG dinucleotide"
  misc_feature (61)..(61): /note="Nucleotide may be methylated to form 5-methylcytosine"
ggagaacgagggggtggagggcatgccagccctaaggatgagcatgggtcaagccatgtccgcatcgaagtgcatcctgtggtttgagactagcaagatcatccacatgactaataccatca

SEQ ID NO: 9737 - DNA, 122 bp, Homo sapiens
  misc_feature (61)..(62): /note="This region represents a CpG dinucleotide"
  misc_feature (61)..(61): /note="Nucleotide may be methylated to form 5-methylcytosine"
tctgagctctcgggcctgtttctgagctccaccctgctgggcagagcagacaaaccagcgcggctcggctcacggactgcacagcttgcttcgtttaaacgtagcctccacacagcccccag

SEQ ID NO: 9738 - DNA, 122 bp, Homo sapiens
  misc_feature (61)..(62): /note="This region represents a CpG dinucleotide"
  misc_feature (61)..(61): /note="Nucleotide may be methylated to form 5-methylcytosine"
tcagctgttgacagtgggcctggcaaggtctcacggtgcagaagacactgagctgtctcacgctggcttgcagtttggtatgtgggatccggtgtgcctgggatgagagcacactcgcaacc

SEQ ID NO: 9739 - DNA, 122 bp, Homo sapiens
  misc_feature (61)..(62): /note="This region represents a CpG dinucleotide"
  misc_feature (61)..(61): /note="Nucleotide may be methylated to form 5-methylcytosine"
tgtacagggtgagatcagcaatacacttctttcctttagtagctttcaagttactatcatcgtaagctggcaaatttaatattgcgtgtcttggatggtgggagcaaaaaagcctatttaac

SEQ ID NO: 9740 - DNA, 122 bp, Homo sapiens
  misc_feature (61)..(62): /note="This region represents a CpG dinucleotide"
  misc_feature (61)..(61): /note="Nucleotide may be methylated to form 5-methylcytosine"
ctcaaatggttttagagcttacaacagtgcattgttagcacatggggctttggccattaccgggctgctacaatttatgatagaccacaccctaaagctagccagaaaggaggatgcactct

SEQ ID NO: 9741 - DNA, 122 bp, Homo sapiens
  misc_feature (61)..(62): /note="This region represents a CpG dinucleotide"
  misc_feature (61)..(61): /note="Nucleotide may be methylated to form 5-methylcytosine"
gcactaatggagaaggccaggaaagcctggattctgtgtgtcctcattgtgctccctcatcgatacactgtctctcaccagcctttggaatttccttcctttggttttctgccatttttttc

SEQ ID NO: 9742 - DNA, 122 bp, Homo sapiens
  misc_feature (61)..(62): /note="This region represents a CpG dinucleotide"
  misc_feature (61)..(61): /note="Nucleotide may be methylated to form 5-methylcytosine"
tgccctgaatcagcaccagccagggtgagacttaggatgataaagagcactggaggcgagcgagacaccaccctgcctgtctgcaaagatgccgaggagtccaaagagatggcattcaggcg

SEQ ID NO: 9743 - DNA, 122 bp, Homo sapiens
  misc_feature (61)..(62): /note="This region represents a CpG dinucleotide"
  misc_feature (61)..(61): /note="Nucleotide may be methylated to form 5-methylcytosine"
tccctctcccacgcgctcacgcagaaaatccagcccagccccagctccccagtaaccccccgcgccccttcagggagcgggatcccaaatacagtgagaaggactcgcagcagcgggagcgc

SEQ ID NO: 9744 - DNA, 122 bp, Homo sapiens
  misc_feature (61)..(62): /note="This region represents a CpG dinucleotide"
  misc_feature (61)..(61): /note="Nucleotide may be methylated to form 5-methylcytosine"
tctttctctgcctatcctgttctttctcctgagcgcaccccggcagtgccagcagtgcggcgtcttcagcatgccaggagcatgtctggctccttggtgctccttccggagtcctgtggaag

SEQ ID NO: 9745 - DNA, 122 bp, Homo sapiens
  misc_feature (61)..(62): /note="This region represents a CpG dinucleotide"
  misc_feature (61)..(61): /note="Nucleotide may be methylated to form 5-methylcytosine"
agcttactacatgtatggcattagtctggtgacctaactttatggcaatgtcttcatctgcgcacttggggaaatacaggcatctatccctgagggtggttgtgaagattcaagtgaaaaag

SEQ ID NO: 9746 - DNA, 122 bp, Homo sapiens
  misc_feature (61)..(62): /note="This region represents a CpG dinucleotide"
  misc_feature (61)..(61): /note="Nucleotide may be methylated to form 5-methylcytosine"
tagaggatactttccaattcaacttctccacagtgagaccagcgatgataaggtcattttcgtagtaaattagtgactgggctaggactgtaacatgaatttccagatccttaatccatttt

SEQ ID NO: 9747 - DNA, 122 bp, Homo sapiens
  misc_feature (61)..(62): /note="This region represents a CpG dinucleotide"
  misc_feature (61)..(61): /note="Nucleotide may be methylated to form 5-methylcytosine"
ttaagctagctacttagctcttgccatgcctcaggcactgtgcttaacactttcccatatcgctccttttatccttgcaataatgtatcacttcaattttatgactgagggaacagccctgg

SEQ ID NO: 9748 - DNA, 122 bp, Homo sapiens
  misc_feature (61)..(62): /note="This region represents a CpG dinucleotide"
  misc_feature (61)..(61): /note="Nucleotide may be methylated to form 5-methylcytosine"
cacacagaatttaagctcacgactgcctataataatacacttgaatctagacttcttgaccgcagtctgcctttttgcaaacaatcagggattatcagggagtctgcagcaggaagtgcctc

SEQ ID NO: 9749 - DNA, 122 bp, Homo sapiens
  misc_feature (61)..(62): /note="This region represents a CpG dinucleotide"
  misc_feature (61)..(61): /note="Nucleotide may be methylated to form 5-methylcytosine"
ggtgatctgcccgcctcggcctcccaaagtgccgggattacaggcgtgagcaaccacgcccggcccaaaacacattttactaccaggcaggagcctgctgcctcccgggcccgcccccggcc

SEQ ID NO: 9750 - DNA, 122 bp, Homo sapiens
  misc_feature (61)..(62): /note="This region represents a CpG dinucleotide"
  misc_feature (61)..(61): /note="Nucleotide may be methylated to form 5-methylcytosine"
gaatcatccctttgtccagcctatccagccctggctcccacccgctagtcactgagtaagcgatttggtcatcagatcgactgttgcagtatggtaatgttgtattcaaataacccttattt

SEQ ID NO: 9751 - DNA, 122 bp, Homo sapiens
  misc_feature (61)..(62): /note="This region represents a CpG dinucleotide"
  misc_feature (61)..(61): /note="Nucleotide may be methylated to form 5-methylcytosine"
tttgcctgtgacccatacggtgacactagagccctgtcttctcagaagggtgccatgcttcgtttaatgctctgctgtgtcttgaaatcctgaacaatttttgaacaaaaggtccacatttt

SEQ ID NO: 9752 - DNA, 122 bp, Homo sapiens
  misc_feature (61)..(62): /note="This region represents a CpG dinucleotide"
  misc_feature (61)..(61): /note="Nucleotide may be methylated to form 5-methylcytosine"
attatatctccctcgccctttgactcttcctggtacaggccagtgcttagcacattaggtcgtagaacagaaagtaggattggccgggttcagtttgaggtttatcacttgctgtgtgatct

SEQ ID NO: 9753 - DNA, 122 bp, Homo sapiens
  misc_feature (61)..(62): /note="This region represents a CpG dinucleotide"
  misc_feature (61)..(61): /note="Nucleotide may be methylated to form 5-methylcytosine"
gactccgtgagctagattatagaattcctgttgacagttataattggtaggcacagaaagcgtaaagatggagtttggaatggaatctggcctgtctgactctaagccctggatccactgta

SEQ ID NO: 9754 - DNA, 122 bp, Homo sapiens
  misc_feature (61)..(62): /note="This region represents a CpG dinucleotide"
  misc_feature (61)..(61): /note="Nucleotide may be methylated to form 5-methylcytosine"
accttttctctacctaaattgatttagttctaaaggaaattgtcattactacaaagaaagcgaagtgatgtcattgaattctagctggctgctgttgacatgctaaaggtctgagcctgaag

SEQ ID NO: 9755 - DNA, 122 bp, Homo sapiens
  misc_feature (61)..(62): /note="This region represents a CpG dinucleotide"
  misc_feature (61)..(61): /note="Nucleotide may be methylated to form 5-methylcytosine"
aatggaacacaggaaataaccatatgtgaaccagagatctaaatcaaccaagttaacagacggggcctgacaggttccagataatctgtagagtcttaagttgtcttgaccatgagcaggtt

SEQ ID NO: 9756 - DNA, 122 bp, Homo sapiens
  misc_feature (61)..(62): /note="This region represents a CpG dinucleotide"
  misc_feature (61)..(61): /note="Nucleotide may be methylated to form 5-methylcytosine"
ttctatagaaaaaatgaaagccaaaggtttacattccaagactggaagactcctaatttacggtatgttcagaacaaaggctgatgtctttatagggaatagaagtaggattagtacagcaa

SEQ ID NO: 9757 - DNA, 122 bp, Homo sapiens
  misc_feature (61)..(62): /note="This region represents a CpG dinucleotide"
  misc_feature (61)..(61): /note="Nucleotide may be methylated to form 5-methylcytosine"
gtcttgagcagggatcgactttttttttttttaaggttccaacagatgatactgtggctacgatgggcagctcagatgtaggccactggcaacacagagtggaaggagaagcccacagggtt

SEQ ID NO: 9758 - DNA, 122 bp, Homo sapiens
  misc_feature (61)..(62): /note="This region represents a CpG dinucleotide"
  misc_feature (61)..(61): /note="Nucleotide may be methylated to form 5-methylcytosine"
tcatgacacagatgggccttgtctgcttggggagtaccttgccccatgtggcaagtttgccgctttggcaggaaggcctgatgtgaagctagattgagaagggagaaggtgtgcagtttgta

SEQ ID NO: 9759 - DNA, 122 bp, Homo sapiens
  misc_feature (61)..(62): /note="This region represents a CpG dinucleotide"
  misc_feature (61)..(61): /note="Nucleotide may be methylated to form 5-methylcytosine"
tttctgcaggaactagagactgggcagagggtgagtgctggctggctctcggggtgtgcacgcaccctcagctgatacattttggaaagtgagttcacctgctctgacacaccctttctacc

SEQ ID NO: 9760 - DNA, 122 bp, Homo sapiens
  misc_feature (61)..(62): /note="This region represents a CpG dinucleotide"
  misc_feature (61)..(61): /note="Nucleotide may be methylated to form 5-methylcytosine"
gacggcagggccagtcacacaagacgtctcttgtgaggtcaggctggcactggtggtatccgtactgcgactccctgtatgtctactttcggcatccctggagaagaccaacgcacatacgc

SEQ ID NO: 9761 - DNA, 122 bp, Homo sapiens
  misc_feature (61)..(62): /note="This region represents a CpG dinucleotide"
  misc_feature (61)..(61): /note="Nucleotide may be methylated to form 5-methylcytosine"
ggggttctctaacgctttctttccattcatcttgccatctcgtgttttcctggggcaagacggaggaagccactatcgtctgatcccattgctattctaagctgcttggattaggaggctat

SEQ ID NO: 9762 - DNA, 122 bp, Homo sapiens
  misc_feature (61)..(62): /note="This region represents a CpG dinucleotide"
  misc_feature (61)..(61): /note="Nucleotide may be methylated to form 5-methylcytosine"
taaaatgactcagccccatggactccaattgcctctgtttaccataaatagaaatagtcacgtaaagtaaaaggtcaacattctagatctccatgaatcattcactgaagtcatggagaaaa

SEQ ID NO: 9763 - DNA, 122 bp, Homo sapiens
  misc_feature (61)..(62): /note="This region represents a CpG dinucleotide"
  misc_feature (61)..(61): /note="Nucleotide may be methylated to form 5-methylcytosine"
ggttctccataatcttctggaaaagacttctgatggctttcacttcttcctttgactaagcgtgctttgatgggagtatgacaggatgtgaggaatgaactttcccaggaaacttaaggtca

SEQ ID NO: 9764 - DNA, 122 bp, Homo sapiens
  misc_feature (61)..(62): /note="This region represents a CpG dinucleotide"
  misc_feature (61)..(61): /note="Nucleotide may be methylated to form 5-methylcytosine"
gagtctcgccaagaccagccaatctccagctaacccaaaaatgcatgagtaggaaatatgcgtatattgttgtatggcactaggactttgggtgttttgaaagtcagaaaaattgggctgat

SEQ ID NO: 9765 - DNA, 122 bp, Homo sapiens
  misc_feature (61)..(62): /note="This region represents a CpG dinucleotide"
  misc_feature (61)..(61): /note="Nucleotide may be methylated to form 5-methylcytosine"
agatgaacacaagcttaggggaatcctaaagaagttgatcatgccctacttgttcaatgccgttttaccagcccaaggcagatccaagttgggggagataaaaagctttaaatagtataagt

SEQ ID NO: 9766 - DNA, 122 bp, Homo sapiens
  misc_feature (61)..(62): /note="This region represents a CpG dinucleotide"
  misc_feature (61)..(61): /note="Nucleotide may be methylated to form 5-methylcytosine"
caaataacaatagcagcagcaactaccatttattgagtgcctattatgtgtcaaattttccggtaaaaggtttttgtttttgtttttaaatttgttgatttaaaagtaaagaaatttactca

SEQ ID NO: 9767 - DNA, 122 bp, Homo sapiens
  misc_feature (61)..(62): /note="This region represents a CpG dinucleotide"
  misc_feature (61)..(61): /note="Nucleotide may be methylated to form 5-methylcytosine"
gaaacaaggacaataatgatcctacctgacatttgagtcatcatgaggatctcctacgaccgtggatgccagtgtgcacgggagatggtaacaccccatctgctagtgacatttcccccttc

SEQ ID NO: 9768 - DNA, 122 bp, Homo sapiens
  misc_feature (61)..(62): /note="This region represents a CpG dinucleotide"
  misc_feature (61)..(61): /note="Nucleotide may be methylated to form 5-methylcytosine"
tagttataatcctcattcattgtctatcagtgctttatgactttgcagaactttcacactcgtatcctcttttaaccatcaaaactagcaatcaggcagacttctgtaaggaaaattgcagt

SEQ ID NO: 9769 - DNA, 122 bp, Homo sapiens
  misc_feature (61)..(62): /note="This region represents a CpG dinucleotide"
  misc_feature (61)..(61): /note="Nucleotide may be methylated to form 5-methylcytosine"
taataagcgcttgtcataggcttggagatcttggccgaaaggcccagcgcatgggcagggcgctttgtttgtttgatgtgtcactctttggggtgggagtaatgaaagccaagatgacgggt

SEQ ID NO: 9770 - DNA, 122 bp, Homo sapiens
  misc_feature (61)..(62): /note="This region represents a CpG dinucleotide"
  misc_feature (61)..(61): /note="Nucleotide may be methylated to form 5-methylcytosine"
ttgcctaattttaagttacttaacttctctgtatctccattgcttcatctgtaaaacgggcgtaattacagaaccagcctcacaagggttgtgaaaatgtaatgagtaactacataaaaagc

SEQ ID NO: 9771 - DNA, 122 bp, Homo sapiens
  misc_feature (61)..(62): /note="This region represents a CpG dinucleotide"
  misc_feature (61)..(61): /note="Nucleotide may be methylated to form 5-methylcytosine"
ccaactcctgacctcagatgatccacctgcctctgcctcccaaagtgctgggattacaggcgtgagcccagcctgagtatgttttctggtgtgattacagtaaggcctacatgtaatccacg

SEQ ID NO: 9772 - DNA, 122 bp, Homo sapiens
  misc_feature (61)..(62): /note="This region represents a CpG dinucleotide"
  misc_feature (61)..(61): /note="Nucleotide may be methylated to form 5-methylcytosine"
agaagtttggaatgtcagacaaggaggaagtgaagctaaatcctggaaccacaggggctacgtctgcacagatgccataactgagagctacatcccttgagaagaaatggaaagcaaaagta

SEQ ID NO: 9773 - DNA, 122 bp, Homo sapiens
  misc_feature (61)..(62): /note="This region represents a CpG dinucleotide"
  misc_feature (61)..(61): /note="Nucleotide may be methylated to form 5-methylcytosine"
tcaatctagcagcatcactcctttgcttaaaaccacttgcattactgtgggatgagcatacgttcagacagacaatggcttctcgtcccagctgttagtcatatgctcttggacaaattaca

SEQ ID NO: 9774 - DNA, 122 bp, Homo sapiens
  misc_feature (61)..(62): /note="This region represents a CpG dinucleotide"
  misc_feature (61)..(61): /note="Nucleotide may be methylated to form 5-methylcytosine"
ccagcacagtagcagttcaggaaatgaggatgataatgagactccatgactgctgagaatcggaagaggaggtatgaattctcattcaaccctaacaattgtccattgtccatgaggccttg

SEQ ID NO: 9775 - DNA, 122 bp, Homo sapiens
  misc_feature (61)..(62): /note="This region represents a CpG dinucleotide"
  misc_feature (61)..(61): /note="Nucleotide may be methylated to form 5-methylcytosine"
ggctttccatgttagcctcaccttgccgcacacaccctctcctgctgtgctctaccacaccgtcttaaggggtgaagagaggcaattgactcaatcttgtatgtatacactcttgcaaaacc

SEQ ID NO: 9776 - DNA, 122 bp, Homo sapiens
  misc_feature (61)..(62): /note="This region represents a CpG dinucleotide"
  misc_feature (61)..(61): /note="Nucleotide may be methylated to form 5-methylcytosine"
cagcccagtctacttgagggctcggtgatggctgcttctttgtatgtgcctgacacagaccgggcagttaaacaaatgtttgttgaatgaatatgttcctggatgagtgagagtggcagaaa

SEQ ID NO: 9777 - DNA, 122 bp, Homo sapiens
  misc_feature (61)..(62): /note="This region represents a CpG dinucleotide"
  misc_feature (61)..(61): /note="Nucleotide may be methylated to form 5-methylcytosine"
tcattgctggcaggaatgtaaaagagtacagccactgtggaaaccagtatggcagttcctcgaaaatgaaacacaggattatcctatgatccagcagttaagcaggtctcaatagggatttt

SEQ ID NO: 9778 - DNA, 122 bp, Homo sapiens
  misc_feature (61)..(62): /note="This region represents a CpG dinucleotide"
  misc_feature (61)..(61): /note="Nucleotide may be methylated to form 5-methylcytosine"
gtgaccaggcagtgtctgtggctaggccatatcagcatagacaatgcagcaagcctttctcgttctgccagtgaaatccagtcacgttcctgcagactcaccataggtgtgttccagtagct

SEQ ID NO: 9779 - DNA, 122 bp, Homo sapiens
  misc_feature (61)..(62): /note="This region represents a CpG dinucleotide"
  misc_feature (61)..(61): /note="Nucleotide may be methylated to form 5-methylcytosine"
tgagagaggcacggaactgcagagggctcctacagcacagccaagatgccaaacagaagccggagacagatggagctgaactcagcctgtcctggtctgcctcctcctcccgaagtgtcctc

SEQ ID NO: 9780 - DNA, 122 bp, Homo sapiens
  misc_feature (61)..(62): /note="This region represents a CpG dinucleotide"
  misc_feature (61)..(61): /note="Nucleotide may be methylated to form 5-methylcytosine"
gttggctcatgagttccctggcacgagagacttgaatgtgttcgtaacatgagttacagacgagaactgggtcatagagttgctgatcaggaatgggcagcttcaggtggcagcatccagca

SEQ ID NO: 9781 - DNA, 122 bp, Homo sapiens
  misc_feature (61)..(62): /note="This region represents a CpG dinucleotide"
  misc_feature (61)..(61): /note="Nucleotide may be methylated to form 5-methylcytosine"
gtaacatggtgagactccatctctacccaaaatacaaaaaataagctgggtgtggtggttcgcgcccgtagtcccagctactggggaggctgaggcaggattgcttgagccccagaaccaga

SEQ ID NO: 9782 - DNA, 122 bp, Homo sapiens
  misc_feature (61)..(62): /note="This region represents a CpG dinucleotide"
  misc_feature (61)..(61): /note="Nucleotide may be methylated to form 5-methylcytosine"
gagagattaccaaattgctctcccgaggagacgctttggcatgacgcgcggtgtctgtcacggcactgttggttaccacacacacgtgttctcagcagacaggcagcatggccccgaagagc

SEQ ID NO: 9783 - DNA, 122 bp, Homo sapiens
  misc_feature (61)..(62): /note="This region represents a CpG dinucleotide"
  misc_feature (61)..(61): /note="Nucleotide may be methylated to form 5-methylcytosine"
tcattattctattccctctgccaattttgtcaactcaatacttaaaggtggaatttgagacgtagatgtttgaccagtccagttgagtaattggtgcagtgcctgtctattcacagagaggt

SEQ ID NO: 9784 - DNA, 122 bp, Homo sapiens
  misc_feature (61)..(62): /note="This region represents a CpG dinucleotide"
  misc_feature (61)..(61): /note="Nucleotide may be methylated to form 5-methylcytosine"
ttttcatcatagcatttgtcaccaccttacacattcttgtttattctgttacctagtctgcgtttctccacaggccttgtttgtcatgtcagagctgtcacggcatatgcagaagggtgtct

SEQ ID NO: 9785 - DNA, 122 bp, Homo sapiens
  misc_feature (61)..(62): /note="This region represents a CpG dinucleotide"
  misc_feature (61)..(61): /note="Nucleotide may be methylated to form 5-methylcytosine"
gggctcaacctggagcaggaagctgaggcctgagctctgggaaagagaggtggtgactcacggagagatattagagtccaaataggagcacatgccctgtacaccaggcatttgggtctcat

SEQ ID NO: 9786 - DNA, 122 bp, Homo sapiens
  misc_feature (61)..(62): /note="This region represents a CpG dinucleotide"
  misc_feature (61)..(61): /note="Nucleotide may be methylated to form 5-methylcytosine"
aaattaagtcattcacccaaggtcacctggcattgctgggaatacaggcaaccttggtttcggagcccatgagcttgaccactatgatatcctgttcttatgctttttccatcaagctaata

SEQ ID NO: 9787 - DNA, 122 bp, Homo sapiens
  misc_feature (61)..(62): /note="This region represents a CpG dinucleotide"
  misc_feature (61)..(61): /note="Nucleotide may be methylated to form 5-methylcytosine"
ctgcattcacctgaaggcttatctggggcccagggattctcttctaaggtagctcatgtacgtgtcttgcaaattatggctgattgttggcaggaggactcaatttctgttcacatgggaat

SEQ ID NO: 9788 - DNA, 122 bp, Homo sapiens
  misc_feature (61)..(62): /note="This region represents a CpG dinucleotide"
  misc_feature (61)..(61): /note="Nucleotide may be methylated to form 5-methylcytosine"
ctgtttactgttaaacagatgctttgcctcaccacttgtctttcagttgcagaagatatccgttttattgcaaaattaaattggtatggctgtctaactgtatctagacaaattatttcccc

SEQ ID NO: 9789 - DNA, 122 bp, Homo sapiens
  misc_feature (61)..(62): /note="This region represents a CpG dinucleotide"
  misc_feature (61)..(61): /note="Nucleotide may be methylated to form 5-methylcytosine"
tctctcccgggacatgaatcatccctttgtccagcgtttctaggctgtatcctctacctgcgcgtcactgcccagcccagagtcactgagcagacatctctgttacaggatcacaaacagat

SEQ ID NO: 9790 - DNA, 122 bp, Homo sapiens
  misc_feature (61)..(62): /note="This region represents a CpG dinucleotide"
  misc_feature (61)..(61): /note="Nucleotide may be methylated to form 5-methylcytosine"
agcccgtcatcatccttacggctctgaggatcccagatcttgttaaataatcctctgtagcgtttaattgtgtctttggggaggcttggatgaggggaggcaagcgaggtgcttccagtgca

SEQ ID NO: 9791 - DNA, 122 bp, Homo sapiens
  misc_feature (61)..(62): /note="This region represents a CpG dinucleotide"
  misc_feature (61)..(61): /note="Nucleotide may be methylated to form 5-methylcytosine"
tccctttctctttcccacagatcctaatgggaccatacttcctatattctcagccaccagcgggtgagcattttgctaatccaggcagactggatgtgcttcagctctgtgggctttagggc

SEQ ID NO: 9792 - DNA, 122 bp, Homo sapiens
  misc_feature (61)..(62): /note="This region represents a CpG dinucleotide"
  misc_feature (61)..(61): /note="Nucleotide may be methylated to form 5-methylcytosine"
tgccaatccattctttacaacacacccaagtaatctttctaaattctgataatgatgttacgtaactctgattcatattctccaatggcttccactgttcttaagatagctaagatctgtaa

SEQ ID NO: 9793 - DNA, 122 bp, Homo sapiens
  misc_feature (61)..(62): /note="This region represents a CpG dinucleotide"
  misc_feature (61)..(61): /note="Nucleotide may be methylated to form 5-methylcytosine"
aaagggccagagtcatagagattccaccttcatgaatgctgaatttgccaagaatgatatcggacagagaggagaagaggaagaagtaagccagacattcaagttatcagtcagttaataac

SEQ ID NO: 9794 - DNA, 122 bp, Homo sapiens
  misc_feature (61)..(62): /note="This region represents a CpG dinucleotide"
  misc_feature (61)..(61): /note="Nucleotide may be methylated to form 5-methylcytosine"
cagctcagtagttgcttgtggaacattttacaactacagaatgacccagaggcagagccacgtgccttgctgcagttgcaggtacatgcactcaacagcatgtccatgaaccctgttctctt

SEQ ID NO: 9795 - DNA, 122 bp, Homo sapiens
  misc_feature (61)..(62): /note="This region represents a CpG dinucleotide"
  misc_feature (61)..(61): /note="Nucleotide may be methylated to form 5-methylcytosine"
gggtctattctattcaacatgggtgtgaccagccattagcacaagcttggaacagagcagcgctcaatgtgtgtttggcaaatggacgggtgaatggaggacgggatgatgcctgcttggtg

SEQ ID NO: 9796 - DNA, 122 bp, Homo sapiens
  misc_feature (61)..(62): /note="This region represents a CpG dinucleotide"
  misc_feature (61)..(61): /note="Nucleotide may be methylated to form 5-methylcytosine"
ttcagggcgggaaacaagattccagaacacttctgagcagtgacaatgggcatagtcactcgtgttcttttctggaccagcacctcatgagttcaccttgctaccatcgaggaaatccagaa

SEQ ID NO: 9797 - DNA, 122 bp, Homo sapiens
  misc_feature (61)..(62): /note="This region represents a CpG dinucleotide"
  misc_feature (61)..(61): /note="Nucleotide may be methylated to form 5-methylcytosine"
atcatcggtcttcagtggctacctgggaaacaccccttggcttagtcggcagattctctccggtgaggttctgttgcacctgccactcctagggcagcaagcagcagtcttacttgctggca

SEQ ID NO: 9798 - DNA, 122 bp, Homo sapiens
  misc_feature (61)..(62): /note="This region represents a CpG dinucleotide"
  misc_feature (61)..(61): /note="Nucleotide may be methylated to form 5-methylcytosine"
ggtattggaatgaatacatatttcatagtgatcattgcacacctatcatggggcagctagcgctgggtcagcctgcctagttgggcaaatgccactgtggccaagcctggcacacagtcagt

SEQ ID NO: 9799 - DNA, 122 bp, Homo sapiens
  misc_feature (61)..(62): /note="This region represents a CpG dinucleotide"
  misc_feature (61)..(61): /note="Nucleotide may be methylated to form 5-methylcytosine"
acccaggttcatcagcagaagcaacaggctggaaatacaaataaaactctactggtaagacgagcacagaggcagctctattccaaaggtggttctaggagatgactccaagagctcaaagt

SEQ ID NO: 9800 - DNA, 122 bp, Homo sapiens
  misc_feature (61)..(62): /note="This region represents a CpG dinucleotide"
  misc_feature (61)..(61): /note="Nucleotide may be methylated to form 5-methylcytosine"
gagaacctgctagcacagagagagatagacagatgggggaagtgatggtgggaagggtggcggtgtggaatgggtctgagtgaactagcaggttcacaacaactattaatgatgactcttgt

SEQ ID NO: 9801 - DNA, 122 bp, Homo sapiens
  misc_feature (61)..(62): /note="This region represents a CpG dinucleotide"
  misc_feature (61)..(61): /note="Nucleotide may be methylated to form 5-methylcytosine"
ctcacccagagcaacttccagtcttctaagctctgttcattgtaggtgccctatccaggtcggccactttataatattttagaacatatttttactgtactttttctatgtttagatgtatt

SEQ ID NO: 9802 - DNA, 122 bp, Homo sapiens
  misc_feature (61)..(62): /note="This region represents a CpG dinucleotide"
  misc_feature (61)..(61): /note="Nucleotide may be methylated to form 5-methylcytosine"
agctcagtactaaatatctactcatccctgattaaataaggtagtaggtcttcactttctcggaagcttctctgtaaattagattatatctagatgcaacataagaaggggaaaccctaatg

SEQ ID NO: 9803 - DNA, 122 bp, Homo sapiens
  misc_feature (61)..(62): /note="This region represents a CpG dinucleotide"
  misc_feature (61)..(61): /note="Nucleotide may be methylated to form 5-methylcytosine"
aaagcaagggaattccatggtaatttaacagactggatcttagccttcatttctagagcacgtggctgtcttagtagaaagcatatttcatcacttaagactggaagctactttgcaatgtg

SEQ ID NO: 9804 - DNA, 122 bp, Homo sapiens
  misc_feature (61)..(62): /note="This region represents a CpG dinucleotide"
  misc_feature (61)..(61): /note="Nucleotide may be methylated to form 5-methylcytosine"
tctgactacctagccaaggcagattcttcttctgtggaatgtcaacctatatctgcctcccgaccaactggacaggcacctgcaaccttagtcttcctatgtcccaacattaacattgcccc

SEQ ID NO: 9805 - DNA, 122 bp, Homo sapiens
  misc_feature (61)..(62): /note="This region represents a CpG dinucleotide"
  misc_feature (61)..(61): /note="Nucleotide may be methylated to form 5-methylcytosine"
accctagaacttaaggtatatatatatatatatagatgttgtttaaaacaattattgttacgcaagtgctactcagtaaatgagtcagctaaaccagtaaggtgactcaaaaagttgagtct

SEQ ID NO: 9806 - DNA, 122 bp, Homo sapiens
  misc_feature (61)..(62): /note="This region represents a CpG dinucleotide"
  misc_feature (61)..(61): /note="Nucleotide may be methylated to form 5-methylcytosine"
tatcagggggtggcagttctgcatctgctcataagttacattaaacatgctcacaagttacgttagagcaaagtgccatcaaagtttgggtgtgagagtacatcttgttactgattacagag

SEQ ID NO: 9807 - DNA, 122 bp, Homo sapiens
  misc_feature (61)..(62): /note="This region represents a CpG dinucleotide"
  misc_feature (61)..(61): /note="Nucleotide may be methylated to form 5-methylcytosine"
ccactggtgagctgcaggcacagcaagtgaactattttgccgaagctccagagacatgaccgtgggcctgcgctacctggactgattggaacagcattgctgctggtcatgctcagaagcca

SEQ ID NO: 9808 - DNA, 122 bp, Homo sapiens
  misc_feature (61)..(62): /note="This region represents a CpG dinucleotide"
  misc_feature (61)..(61): /note="Nucleotide may be methylated to form 5-methylcytosine"
acagcagtgcagacacatttccaggtggagggtttgcagcctgctctaacttaatgttcccgctcccacactccactcccagtctgaaatgcatttcgaggagaacaagtaaaacctgccct

SEQ ID NO: 9809 - DNA, 122 bp, Homo sapiens
  misc_feature (61)..(62): /note="This region represents a CpG dinucleotide"
  misc_feature (61)..(61): /note="Nucleotide may be methylated to form 5-methylcytosine"
tcaagcgtttgccacagggctgggacacagaaatgctcaatcgatgttggctattattatcgtcagctctcccacagagggctaagggaaggttgcttgtgatgtccatctgaaaatggaca

SEQ ID NO: 9810 - DNA, 122 bp, Homo sapiens
  misc_feature (61)..(62): /note="This region represents a CpG dinucleotide"
  misc_feature (61)..(61): /note="Nucleotide may be methylated to form 5-methylcytosine"
cccacagatgaatatgctgacagtggtttcagctgctcggtggtgattcagacctggacgcgtggcttcagtagccctggggccacactgcctgcccgcagcctcctgtcttgctctatgct

SEQ ID NO: 9811 - DNA, 122 bp, Homo sapiens
  misc_feature (61)..(62): /note="This region represents a CpG dinucleotide"
  misc_feature (61)..(61): /note="Nucleotide may be methylated to form 5-methylcytosine"
cttggttccagggagactccctcgatgctattccagcctttcagatggcctgttgtgtgacgctggctgtgtctcaatttccggtttgatcaatggttttacattacttcagccacaaaatc

SEQ ID NO: 9812 - DNA, 122 bp, Homo sapiens
  misc_feature (61)..(62): /note="This region represents a CpG dinucleotide"
  misc_feature (61)..(61): /note="Nucleotide may be methylated to form 5-methylcytosine"
acgcggcgcaggccgcgctgccgccaggctactccaacctgctgcctccgccgccgccaccgcccccgccgcccacctgccgccagttgtcacccaacccggcccccgacgacctcccgtgg

SEQ ID NO: 9813 - DNA, 122 bp, Homo sapiens
  misc_feature (61)..(62): /note="This region represents a CpG dinucleotide"
  misc_feature (61)..(61): /note="Nucleotide may be methylated to form 5-methylcytosine"
ccgactttggcagcaagcatacaccctgattactcaatgccagggacagagagaggccagcgctaggagcaatgaggactggcttggccactcactcgcatgtgaccccaggcaagtcactt

SEQ ID NO: 9814 - DNA, 122 bp, Homo sapiens
  misc_feature (61)..(62): /note="This region represents a CpG dinucleotide"
  misc_feature (61)..(61): /note="Nucleotide may be methylated to form 5-methylcytosine"
ctagtagggcaggaaggttccaagagccggcacatgacctcatcccttcagctgctggtacggagtgtttccatgagggtgggtgggggtagggcctgggatgtctcactgggccctcaccc

SEQ ID NO: 9815 - DNA, 122 bp, Homo sapiens
  misc_feature (61)..(62): /note="This region represents a CpG dinucleotide"
  misc_feature (61)..(61): /note="Nucleotide may be methylated to form 5-methylcytosine"
acctattttattccaaaatgaggtaggagtgctgagctaaactggtgcccttaagggttacgtcctagagactaaagatgcattcactgaaagtcattcatgagcaatgattgggaagactc

SEQ ID NO: 9816 - DNA, 122 bp, Homo sapiens
  misc_feature (61)..(62): /note="This region represents a CpG dinucleotide"
  misc_feature (61)..(61): /note="Nucleotide may be methylated to form 5-methylcytosine"
ctaagggaggaaaaggaactgctgggtctctgcaaagctctctcttcatgaaggcccaaacgcttgtaaggaaatgccttattaatgctcacaatatcccctaggaagagggtgtgggaaaa

SEQ ID NO: 9817 - DNA, 122 bp, Homo sapiens
  misc_feature (61)..(62): /note="This region represents a CpG dinucleotide"
  misc_feature (61)..(61): /note="Nucleotide may be methylated to form 5-methylcytosine"
gaatgctggcccagaggaatcaaagtctcagagtgaacctcctcttgtctccattttctccgccatctcacacccggcattagaaattacaattcatcaatcagcgtgatgaacattagcat

SEQ ID NO: 9818 - DNA, 122 bp, Homo sapiens
  misc_feature (61)..(62): /note="This region represents a CpG dinucleotide"
  misc_feature (61)..(61): /note="Nucleotide may be methylated to form 5-methylcytosine"
agtgctccaggcatctcagtgggtagaggccagggatgctggtaaaaatcctcctttactcggaacagccactcacaggaaagaattataaggctcaaaatgtcaataggctgggcgtggtg

SEQ ID NO: 9819 - DNA, 122 bp, Homo sapiens
  misc_feature (61)..(62): /note="This region represents a CpG dinucleotide"
  misc_feature (61)..(61): /note="Nucleotide may be methylated to form 5-methylcytosine"
aggccgctccgcaccaggcatataagtactcagggaatgtgaattccttgtcccctcttccgctttgagttaagaagatgcctctcttgcctgctgctgacagcgtgtggggtggcattccc

SEQ ID NO: 9820 - DNA, 122 bp, Homo sapiens
  misc_feature (61)..(62): /note="This region represents a CpG dinucleotide"
  misc_feature (61)..(61): /note="Nucleotide may be methylated to form 5-methylcytosine"
ctcatcaggctttggcctttatcctacagaggaacaatactacactcgcatctgacatcacggggcttagggcttcagaaatgaagacaggtgcccacatgcccacatcatccctagggccc

SEQ ID NO: 9821 - DNA, 122 bp, Homo sapiens
  misc_feature (61)..(62): /note="This region represents a CpG dinucleotide"
  misc_feature (61)..(61): /note="Nucleotide may be methylated to form 5-methylcytosine"
gggcaatgggcagtagatcaagctggcctgccctgcgtgggccctcagcagggatgcaggcgaggctcccagaagacgatgactcaggcctgcatctgtgactggttattccagatgctgcc

SEQ ID NO: 9822 - DNA, 122 bp, Homo sapiens
  misc_feature (61)..(62): /note="This region represents a CpG dinucleotide"
  misc_feature (61)..(61): /note="Nucleotide may be methylated to form 5-methylcytosine"
aattattagagagtcaagctatttcccaaactggctgaaccactgtactcccggtagcaacgtatgagaaactagttgctctacatcctcaccaaccatttttaattttagtcattttcgtg

SEQ ID NO: 9823 - DNA, 122 bp, Homo sapiens
  misc_feature (61)..(62): /note="This region represents a CpG dinucleotide"
  misc_feature (61)..(61): /note="Nucleotide may be methylated to form 5-methylcytosine"
caccaaatgcattttgtggtcttactgtttgcttttgctggaccgtatgtcttttcaccccgctctgttgtaccttatgatgaggggcaaataaccacaaagcaggaaaccttgtcaaggaa

SEQ ID NO: 9824 - DNA, 122 bp, Homo sapiens
  misc_feature (61)..(62): /note="This region represents a CpG dinucleotide"
  misc_feature (61)..(61): /note="Nucleotide may be methylated to form 5-methylcytosine"
tgtctgcatgcgtgtgcatgcatgtgtctgtgtggtttggacttggcgtgttatcccaggcgggccttgccatccagaaaagaagaaggcagttaggaaatgcacttaactgctgcagggaa

SEQ ID NO: 9825 - DNA, 122 bp, Homo sapiens
  misc_feature (61)..(62): /note="This region represents a CpG dinucleotide"
  misc_feature (61)..(61): /note="Nucleotide may be methylated to form 5-methylcytosine"
tggtgagaacatcagtgaccataatggcccttcctgtcagtgtttgctgcggattgttctcggaaccgcaggggacagacacaggcttatagcctgtagagatttacaaggggtgactgcaa

SEQ ID NO: 9826 - DNA, 122 bp, Homo sapiens
  misc_feature (61)..(62): /note="This region represents a CpG dinucleotide"
  misc_feature (61)..(61): /note="Nucleotide may be methylated to form 5-methylcytosine"
aataacactcaccaaatattccatgtgcttcctcacatttgctagtttttttgttgtaggcgaggccatgtgattagtcctgagagaaagcattgtgagtcatttccaagctgcagtaccta

SEQ ID NO: 9827 - DNA, 122 bp, Homo sapiens
  misc_feature (61)..(62): /note="This region represents a CpG dinucleotide"
  misc_feature (61)..(61): /note="Nucleotide may be methylated to form 5-methylcytosine"
gaaccagagccaggtataaagaacaaggcgatggaggtgtgcggctgcgtagacgtctgccggccgaagatgggtgtgcgaccccggaggggatcactttctttgtgtaaggcctttagtgc

SEQ ID NO: 9828 - DNA, 122 bp, Homo sapiens
  misc_feature (61)..(62): /note="This region represents a CpG dinucleotide"
  misc_feature (61)..(61): /note="Nucleotide may be methylated to form 5-methylcytosine"
gaattaaatttatttttgttcattgtttttttaaaaaatggcaggagcaaacctgacaagcgctgcctccatcaggtgatcaaagggaacatccagggcactaagtcctgctgatacaccct

SEQ ID NO: 9829 - DNA, 122 bp, Homo sapiens
  misc_feature (61)..(62): /note="This region represents a CpG dinucleotide"
  misc_feature (61)..(61): /note="Nucleotide may be methylated to form 5-methylcytosine"
tccctcccagcccctgagtcatgaacagcaaggagtgtttgaagtttctgctttgaactccgtccagcctgatccctggcctgagcaacttcacaacagtaattgcactttaagacagccta

SEQ ID NO: 9830 - DNA, 122 bp, Homo sapiens
  misc_feature (61)..(62): /note="This region represents a CpG dinucleotide"
  misc_feature (61)..(61): /note="Nucleotide may be methylated to form 5-methylcytosine"
ttagatctgaaggtcagactcttgacagggtatgtttgtccgacacttatagggaggagtcggtaattcacaggtggggtgttttatagttggaattgtttttgtgatcaagctgaatctca

SEQ ID NO: 9831 - DNA, 122 bp, Homo sapiens
  misc_feature (61)..(62): /note="This region represents a CpG dinucleotide"
  misc_feature (61)..(61): /note="Nucleotide may be methylated to form 5-methylcytosine"
gaaagaatttgacacactttaaaaactatggctggaggccagatgcctgtaatcccagcacgccaggaagcaaagccaggtggatcacctaagttcagaagtttgagaccagcccggccaaa

SEQ ID NO: 9832 - DNA, 122 bp, Homo sapiens
  misc_feature (61)..(62): /note="This region represents a CpG dinucleotide"
  misc_feature (61)..(61): /note="Nucleotide may be methylated to form 5-methylcytosine"
gctgggattgcaggcgtgagctacaaggctaccaactgactgactcaggggatgtgtctccgcttaccatagatctgtcattagcgtatataggcctcaaagagctgtaagcaaccatgtct

SEQ ID NO: 9833 - DNA, 122 bp, Homo sapiens
  misc_feature (61)..(62): /note="This region represents a CpG dinucleotide"
  misc_feature (61)..(61): /note="Nucleotide may be methylated to form 5-methylcytosine"
aggcactcaacctctctaagcctcattttccttgtctataagatggaacaagtaataacacgaatcatctcttaggactgatgtgaagattaactaaaagattgtctgtgaagggcctagtg

SEQ ID NO: 9834 - DNA, 122 bp, Homo sapiens
  misc_feature (61)..(62): /note="This region represents a CpG dinucleotide"
  misc_feature (61)..(61): /note="Nucleotide may be methylated to form 5-methylcytosine"
aacagctgaggccagtcttggagcagaatttgcaggcttttgtagagatctacagccgtccgtctctgggtacttgactcaaattcatagatgacttgaaggaagtcttcatacttgccagg

SEQ ID NO: 9835 - DNA, 122 bp, Homo sapiens
  misc_feature (61)..(62): /note="This region represents a CpG dinucleotide"
  misc_feature (61)..(61): /note="Nucleotide may be methylated to form 5-methylcytosine"
tctatctttggtcaacatctatctgactaaaagctagttctgaagtatgtaaacatcagccgtctctgcttctgaactgggcagctgaagcctgctggaaaaaaaaatgtagatagattgtt

SEQ ID NO: 9836 - DNA, 122 bp, Homo sapiens
  misc_feature (61)..(62): /note="This region represents a CpG dinucleotide"
  misc_feature (61)..(61): /note="Nucleotide may be methylated to form 5-methylcytosine"
gctgaatgggacaaggagcactggataagcagaaaggcagagccgaagatcacaggcagacgctgagcttgagtgagagagaactgtgctgccactcactacagcagaaagcacagcaggcc

SEQ ID NO: 9837 - DNA, 122 bp, Homo sapiens
  misc_feature (61)..(62): /note="This region represents a CpG dinucleotide"
  misc_feature (61)..(61): /note="Nucleotide may be methylated to form 5-methylcytosine"
ggcctcctacatggaaatgttggggctgtctctggtggctcctaattccctgaaacccttcgtaaatggtttgttgacatctgcagttcctgaggtctcttagattaaacagtgatgtcctg

SEQ ID NO: 9838 - DNA, 122 bp, Homo sapiens
  misc_feature (61)..(62): /note="This region represents a CpG dinucleotide"
  misc_feature (61)..(61): /note="Nucleotide may be methylated to form 5-methylcytosine"
atgtgtgagctcagctgaagtaaacaccttccacgtactgagaacagggctggctcctggcgatctaacatcttacagtctacaggggcccctgatcagtaagggctgaggattgcagatag

SEQ ID NO: 9839 - DNA, 122 bp, Homo sapiens
  misc_feature (61)..(62): /note="This region represents a CpG dinucleotide"
  misc_feature (61)..(61): /note="Nucleotide may be methylated to form 5-methylcytosine"
catcactgctaatgctcagggataaaccttaagagataaccatgactcctttctttctttcgcactccatacttcaagtatgtcagcaaatcctctcagctctatcttcaaaatatattcaa

SEQ ID NO: 9840 - DNA, 122 bp, Homo sapiens
  misc_feature (61)..(62): /note="This region represents a CpG dinucleotide"
  misc_feature (61)..(61): /note="Nucleotide may be methylated to form 5-methylcytosine"
tgaaaaagttattttaaagggctctatcatcaccaagttatgtgggccccatctaacctacgccaatttcaaaaatgacacatggataggagataatttactctttcaagtcacacaagatt

SEQ ID NO: 9841 - DNA, 122 bp, Homo sapiens
  misc_feature (61)..(62): /note="This region represents a CpG dinucleotide"
  misc_feature (61)..(61): /note="Nucleotide may be methylated to form 5-methylcytosine"
gataaaggtgggactgttagctttacaagaagaggaagagaaacctgagcttagtgccctcgacatgtgatgccctacacagccttgggactctgcagtctccaccagcaagaagggcctca

SEQ ID NO: 9842 - DNA, 122 bp, Homo sapiens
  misc_feature (61)..(62): /note="This region represents a CpG dinucleotide"
  misc_feature (61)..(61): /note="Nucleotide may be methylated to form 5-methylcytosine"
tattatgagaggttgaataggcttcatctctcagtggtgattaacatagttcttaagaaacgtgacagagctaggccaagcatcagtaaaggaacacactcttggagcttaattgaggaggg

SEQ ID NO: 9843 - DNA, 122 bp, Homo sapiens
  misc_feature (61)..(62): /note="This region represents a CpG dinucleotide"
  misc_feature (61)..(61): /note="Nucleotide may be methylated to form 5-methylcytosine"
actatagatttcacaactctcttaccttggctgccactataaaatgccacaggccaggtacggtggctcatgcctataatctcagcactttgggaggctgaagcgggtggatcacccgaggt

SEQ ID NO: 9844 - DNA, 122 bp, Homo sapiens
  misc_feature (61)..(62): /note="This region represents a CpG dinucleotide"
  misc_feature (61)..(61): /note="Nucleotide may be methylated to form 5-methylcytosine"
gctgagaggccgcggacggagtaacagctggattctgaggacgtggaagaggccacaccacgcagcagaaggaaggaggaagtgtacccggagctgaaaccaggccctttccaaccaccaca

SEQ ID NO: 9845 - DNA, 122 bp, Homo sapiens
  misc_feature (61)..(62): /note="This region represents a CpG dinucleotide"
  misc_feature (61)..(61): /note="Nucleotide may be methylated to form 5-methylcytosine"
cctaacacgaggcaccttggaaacaggtatagctacggatttatgggttttaaaatggaacgtcttggtgaatggacatagcgtgcatttcacagtctgacgtcacagccctcgcaggtttt

SEQ ID NO: 9846 - DNA, 122 bp, Homo sapiens
  misc_feature (61)..(62): /note="This region represents a CpG dinucleotide"
  misc_feature (61)..(61): /note="Nucleotide may be methylated to form 5-methylcytosine"
atccagtgctcagggccagtccctgctctgcacatggaagtgcaactgagattagaaacacggtgagacacctaatccctgcactgccctttcatgaatctcgacctgctaacatattcatc

SEQ ID NO: 9847 - DNA, 122 bp, Homo sapiens
  misc_feature (61)..(62): /note="This region represents a CpG dinucleotide"
  misc_feature (61)..(61): /note="Nucleotide may be methylated to form 5-methylcytosine"
aaggagccaagagcacctgcttctaaattacccctgcatgatcagcaaagctactgcagacgctctttctatcttagctcttggtgtctcagagttaggtatttcacttagaaaagattaag

SEQ ID NO: 9848 - DNA, 122 bp, Homo sapiens
  misc_feature (61)..(62): /note="This region represents a CpG dinucleotide"
  misc_feature (61)..(61): /note="Nucleotide may be methylated to form 5-methylcytosine"
ggctgaggcctgggccctgggaagtgacagcagccctgtgtagtgttttcaaagatcaggcgtggggacccacaccttggcctccaggcctaaggaggagtgttacgtgcagtagcacccgt

SEQ ID NO: 9849 - DNA, 122 bp, Homo sapiens
  misc_feature (61)..(62): /note="This region represents a CpG dinucleotide"
  misc_feature (61)..(61): /note="Nucleotide may be methylated to form 5-methylcytosine"
tcagggtcaggcttggttctcagatggtcagggactacctcatggctgaaaacaggcacccgtccttcagtctgccgctgtaacacacagattttattgatcctactctgtactccaagaag

SEQ ID NO: 9850 - DNA, 122 bp, Homo sapiens
  misc_feature (61)..(62): /note="This region represents a CpG dinucleotide"
  misc_feature (61)..(61): /note="Nucleotide may be methylated to form 5-methylcytosine"
agtgaaccatcctcttcccattttccagaagaggaagccaaggctgagaatgaggagtgacgtgctcagaatcacacaacaggaagggtggagaatctctgcctggcacaaagtgcttcttt

SEQ ID NO: 9851 - DNA, 122 bp, Homo sapiens
  misc_feature (61)..(62): /note="This region represents a CpG dinucleotide"
  misc_feature (61)..(61): /note="Nucleotide may be methylated to form 5-methylcytosine"
ccttagctattactgtttttcaggtgtccttgactcaccattctcttattacagagactacgtctgtcttactcatttgtttccaaaacctcctcgagtaaaaagaggaatttgctggaagg

SEQ ID NO: 9852 - DNA, 122 bp, Homo sapiens
  misc_feature (61)..(62): /note="This region represents a CpG dinucleotide"
  misc_feature (61)..(61): /note="Nucleotide may be methylated to form 5-methylcytosine"
ctatggctgctcctgcaggaggtaccaaatgcttcaacatgagtcaacagagagccacaccggggatgctgtggccactgcggatgacatcaggtctgattttcattgtgtaatgaaaatat

SEQ ID NO: 9853 - DNA, 122 bp, Homo sapiens
  misc_feature (61)..(62): /note="This region represents a CpG dinucleotide"
  misc_feature (61)..(61): /note="Nucleotide may be methylated to form 5-methylcytosine"
taaatgctttatttggtcaaaaactggaagctgacgctccacttaagagtctaggtcacgcggcaagccagacacttgaaggagcttaaagctttctgttcttaatagtattttagacactt

SEQ ID NO: 9854 - DNA, 122 bp, Homo sapiens
  misc_feature (61)..(62): /note="This region represents a CpG dinucleotide"
  misc_feature (61)..(61): /note="Nucleotide may be methylated to form 5-methylcytosine"
accccctactctcactccacgtgaggggataggatggagcaagatgaaggctgagtatgacgggcccacaagtcctgttcttggcccgtgttctctaatcataattacagccactgcctgtt

SEQ ID NO: 9855 - DNA, 122 bp, Homo sapiens
  misc_feature (61)..(62): /note="This region represents a CpG dinucleotide"
  misc_feature (61)..(61): /note="Nucleotide may be methylated to form 5-methylcytosine"
tattcagtcttaaaaagtctgttgaaaggactatgaataggtttcctactctcattcctacgatgactcatccagggtcaagaactagagtttcacaagacagggacagagaccagaggtca

SEQ ID NO: 9856 - DNA, 122 bp, Homo sapiens
  misc_feature (61)..(62): /note="This region represents a CpG dinucleotide"
  misc_feature (61)..(61): /note="Nucleotide may be methylated to form 5-methylcytosine"
attcacaacaacatctcaacctaaagaagaagaactacacaacagtggccagtttcaggacgtaacaaaatgcctgtcattggcactgagatatgaaacagcagaggatgcatgaatcagtg

SEQ ID NO: 9857 - DNA, 122 bp, Homo sapiens
  misc_feature (61)..(62): /note="This region represents a CpG dinucleotide"
  misc_feature (61)..(61): /note="Nucleotide may be methylated to form 5-methylcytosine"
gcttgcacaacctgtaagcgcttttgtaatctgcgggcacggctctcaatgtcagcctgtcgccgcagtaaagctgttatccttgtgtcagaatctaaagcactgaaaagaatggaagacag

SEQ ID NO: 9858 - DNA, 122 bp, Homo sapiens
  misc_feature (61)..(62): /note="This region represents a CpG dinucleotide"
  misc_feature (61)..(61): /note="Nucleotide may be methylated to form 5-methylcytosine"
atctaagcattatgtagaagcctattaaaatcttggagtattttttttgtaatttaaaaacgtaattgtggtttgcattgtgcccagttttcaaaaaagtatgtgattggtgccacagctta

SEQ ID NO: 9859 - DNA, 122 bp, Homo sapiens
  misc_feature (61)..(62): /note="This region represents a CpG dinucleotide"
  misc_feature (61)..(61): /note="Nucleotide may be methylated to form 5-methylcytosine"
aacatgggatttgggcggggacaaatatccaactctatcatttacttgactacaacaaagcgtgttgaggattagcagccagctctgacacataggaactagggtcccctgtttgcttctga

SEQ ID NO: 9860 - DNA, 122 bp, Homo sapiens
  misc_feature (61)..(62): /note="This region represents a CpG dinucleotide"
  misc_feature (61)..(61): /note="Nucleotide may be methylated to form 5-methylcytosine"
tgctggcctttggcattccttacattgcagctgcatcaccaaagtctctgactcagccttcgcctctccttctcctctctgggtgtgtctactctccctctgcccctctgtgtaaggacact

SEQ ID NO: 9861 - DNA, 122 bp, Homo sapiens
  misc_feature (61)..(62): /note="This region represents a CpG dinucleotide"
  misc_feature (61)..(61): /note="Nucleotide may be methylated to form 5-methylcytosine"
aaatctccatcctccatctccactcttggaaaatgcagctgccctgcacacccacagccccgcccccgccccaccacggaggcctatggacgccaccacgacaccacatggcagttactcgg

SEQ ID NO: 9862 - DNA, 122 bp, Homo sapiens
  misc_feature (61)..(62): /note="This region represents a CpG dinucleotide"
  misc_feature (61)..(61): /note="Nucleotide may be methylated to form 5-methylcytosine"
ttaccagatgaccttgtccatgtctgctgccagtcttagagtagcagtgactatctgaagcgtgactctaaggcattacataagaatcacagcagagccacatagagaatagactaatgagg

SEQ ID NO: 9863 - DNA, 122 bp, Homo sapiens
  misc_feature (61)..(62): /note="This region represents a CpG dinucleotide"
  misc_feature (61)..(61): /note="Nucleotide may be methylated to form 5-methylcytosine"
aggctttgagtcctggagatagatcctgctctgctggttgaggaccttaatcataaggcacggtattaacagcaaggttccaggataactgtctgcagtgtcacagtgtaaaaggagaaatg

SEQ ID NO: 9864 - DNA, 122 bp, Homo sapiens
  misc_feature (61)..(62): /note="This region represents a CpG dinucleotide"
  misc_feature (61)..(61): /note="Nucleotide may be methylated to form 5-methylcytosine"
tccacccatacagccccatgagtcagcatagtgtggcagctcctggcagcaaccccaggacgctcttagaagttagctcattggcgggctaatctgattggacacctcatactctcccagtt

SEQ ID NO: 9865 - DNA, 122 bp, Homo sapiens
  misc_feature (61)..(62): /note="This region represents a CpG dinucleotide"
  misc_feature (61)..(61): /note="Nucleotide may be methylated to form 5-methylcytosine"
gggatgattcacgttccaggtgggacagcaagcgatttcatcgtgcttctcaggatgacacgtaatttgaaactgatgaactgtttatttccatttaatattttcttttctttttctttttt

SEQ ID NO: 9866 - DNA, 122 bp, Homo sapiens
  misc_feature (61)..(62): /note="This region represents a CpG dinucleotide"
  misc_feature (61)..(61): /note="Nucleotide may be methylated to form 5-methylcytosine"
atcaggggaaggagggaagggaaaagtatacatcctgccaccttcttctccaattagctgcgttgacactctgggcttccattagctttctagaaagagtccttaggaaggagagagaggct

SEQ ID NO: 9867 - DNA, 122 bp, Homo sapiens
  misc_feature (61)..(62): /note="This region represents a CpG dinucleotide"
  misc_feature (61)..(61): /note="Nucleotide may be methylated to form 5-methylcytosine"
gcttttagttgggctgcactggcttgtttaaatagccaaacacctgctaggcaagccctgcgcatgtgagtggctatatatgttccttcctttaggatttgcaaggctggagcacaaagaca

SEQ ID NO: 9868 - DNA, 122 bp, Homo sapiens
  misc_feature (61)..(62): /note="This region represents a CpG dinucleotide"
  misc_feature (61)..(61): /note="Nucleotide may be methylated to form 5-methylcytosine"
ttggaatgctgagaattgtctagcaagccctgcggggtcatctggttctgcagagctgtgcgctgctggagcaggctggtcagccactctggacattatagaacacagagagtaacacgcat

SEQ ID NO: 9869 - DNA, 122 bp, Homo sapiens
  misc_feature (61)..(62): /note="This region represents a CpG dinucleotide"
  misc_feature (61)..(61): /note="Nucleotide may be methylated to form 5-methylcytosine"
gcctgacttcagtcatttttatgattaatccccagattagcctacaaaatttcacgccatcgagagtgagctatattcaatatcacttcacccagtgcttcattccatgaatcaacacagcc

SEQ ID NO: 9870 - DNA, 122 bp, Homo sapiens
  misc_feature (61)..(62): /note="This region represents a CpG dinucleotide"
  misc_feature (61)..(61): /note="Nucleotide may be methylated to form 5-methylcytosine"
taagcccatggaggcagagagctttcttattagattttgtcatgatcctctaaagtaccacggagttgaatgtcaagttatattaaggaagtgaaatcaatagaatttagtcatggagttga

SEQ ID NO: 9871 - DNA, 122 bp, Homo sapiens
  misc_feature (61)..(62): /note="This region represents a CpG dinucleotide"
  misc_feature (61)..(61): /note="Nucleotide may be methylated to form 5-methylcytosine"
ttcctgggagtttcagtggtggccagagagtttaaatgaagccctactttggggcaggagcgggaggaaactagatgaggtcagctgtctccactttctgatcctgacgtgacatctaaggg

SEQ ID NO: 9872 - DNA, 122 bp, Homo sapiens
  misc_feature (61)..(62): /note="This region represents a CpG dinucleotide"
  misc_feature (61)..(61): /note="Nucleotide may be methylated to form 5-methylcytosine"
gccaccatgctggccaggccttagcttttaatgctgagattttgccacttggaggctgtgcgactctagacaagtgattagcttttaatgctgagcttagcttttaatagacaagtgaatag

SEQ ID NO: 9873 - DNA, 122 bp, Homo sapiens
  misc_feature (61)..(62): /note="This region represents a CpG dinucleotide"
  misc_feature (61)..(61): /note="Nucleotide may be methylated to form 5-methylcytosine"
acatagactccagaggtaagcctacattcacttttattaccacaatctcccaagagattacgtgagctcaaaactaacgtaacaggttgcaaagtcacaagcagctgcttccgaagcttgtg

SEQ ID NO: 9874 - DNA, 122 bp, Homo sapiens
  misc_feature (61)..(62): /note="This region represents a CpG dinucleotide"
  misc_feature (61)..(61): /note="Nucleotide may be methylated to form 5-methylcytosine"
cctgcttggctgttttgctcacagtgggaacctggtctggggtgattcactatcactcatcgctccacagaaggatggtgcccggtgcacatccccaggatagtgttaaccgtcacctttac

SEQ ID NO: 9875 - DNA, 122 bp, Homo sapiens
  misc_feature (61)..(62): /note="This region represents a CpG dinucleotide"
  misc_feature (61)..(61): /note="Nucleotide may be methylated to form 5-methylcytosine"
aggagctgagtacttgaggaagaaggtgctgaggggaaagggtgtgcctgggatgggctacgctttgtcagttgcctcaggaggtagctctgacaccacttcttagaagcagtgactcctgc

SEQ ID NO: 9876 - DNA, 122 bp, Homo sapiens
  misc_feature (61)..(62): /note="This region represents a CpG dinucleotide"
  misc_feature (61)..(61): /note="Nucleotide may be methylated to form 5-methylcytosine"
gtggttgagcatgacatgctctttggtttatgcaggccgcacagcagccatctagacacacgcaaagcagcacagctgagctttaggacatcatgtgcttctgcagtgacaactgaaaaaaa

SEQ ID NO: 9877 - DNA, 122 bp, Homo sapiens
  misc_feature (61)..(62): /note="This region represents a CpG dinucleotide"
  misc_feature (61)..(61): /note="Nucleotide may be methylated to form 5-methylcytosine"
tccccacagccacctgtcttagggaagcacagaaggcaagacattgctgccaacaaactccgcttccctgactctgcagagggatgcaccgcaccctgccagcctggcttcctttctgagca

SEQ ID NO: 9878 - DNA, 122 bp, Homo sapiens
  misc_feature (61)..(62): /note="This region represents a CpG dinucleotide"
  misc_feature (61)..(61): /note="Nucleotide may be methylated to form 5-methylcytosine"
aggataaaagaaagatgtaagtttttttctctcgccctgctctgcttatcacagaagctccgtatcaagatgacagagctcagcctggtactggtacaaaaacagactcatagaccaatgga

SEQ ID NO: 9879 - DNA, 122 bp, Homo sapiens
  misc_feature (61)..(62): /note="This region represents a CpG dinucleotide"
  misc_feature (61)..(61): /note="Nucleotide may be methylated to form 5-methylcytosine"
agctctagagtagttcacactttgctggggaagacagtcaccccatacccgccaagttaccgcaaggcaagagccctggaggaaatagctgagagccacggcatgggatggagaaaaacaaa

SEQ ID NO: 9880 - DNA, 122 bp, Homo sapiens
  misc_feature (61)..(62): /note="This region represents a CpG dinucleotide"
  misc_feature (61)..(61): /note="Nucleotide may be methylated to form 5-methylcytosine"
ctttctcataaaagcctccatatacccaacgaatggcgaatgatgttacaataagcagcacgtgtcccatttcctcccataaggaataatcctctttttgtgattctccttttcacttcatc

SEQ ID NO: 9881 - DNA, 122 bp, Homo sapiens
  misc_feature (61)..(62): /note="This region represents a CpG dinucleotide"
  misc_feature (61)..(61): /note="Nucleotide may be methylated to form 5-methylcytosine"
cggcctgctgtcagctgtgcctgtgttgttccttgcacatcactgttgtgacactggtgccgcctccaagagatgatgctgcctgctcttgttccccagccaggaagcagtacatctttagt

SEQ ID NO: 9882 - DNA, 122 bp, Homo sapiens
  misc_feature (61)..(62): /note="This region represents a CpG dinucleotide"
  misc_feature (61)..(61): /note="Nucleotide may be methylated to form 5-methylcytosine"
cctctctacatctccattcttattttatagattgccgttctttggtcttcatggcaggtacgcagcccccactgcttgtgagtgtatgtgacacagggccagctacctcaaggaagtgactc

SEQ ID NO: 9883 - DNA, 122 bp, Homo sapiens
  misc_feature (61)..(62): /note="This region represents a CpG dinucleotide"
  misc_feature (61)..(61): /note="Nucleotide may be methylated to form 5-methylcytosine"
tggtaacccatttgagcagctgtatgatctgaatagtctggaggggggtatgattacttacggctacattagtcaccataaataatccagttgccctgcagagtaacactcttggctgagca

SEQ ID NO: 9884 - DNA, 122 bp, Homo sapiens
  misc_feature (61)..(62): /note="This region represents a CpG dinucleotide"
  misc_feature (61)..(61): /note="Nucleotide may be methylated to form 5-methylcytosine"
cacctcagaaaacaaatctaggatcagtgggtggacaccactggaaagtgggtttcaattcgatggtaggaatttcttcagagtcagggatattagtgctcaaagtcacacaacaagctgaa

SEQ ID NO: 9885 - DNA, 122 bp, Homo sapiens
  misc_feature (61)..(62): /note="This region represents a CpG dinucleotide"
  misc_feature (61)..(61): /note="Nucleotide may be methylated to form 5-methylcytosine"
ccctagtggggtggagtgtctgtgtgaaggtaacaccccaattaaagctgcctttctccacgctgtcactgagctccaaaggcaaataggattatgcttgaggaagggaaaagcaattgaca

SEQ ID NO: 9886 - DNA, 122 bp, Homo sapiens
  misc_feature (61)..(62): /note="This region represents a CpG dinucleotide"
  misc_feature (61)..(61): /note="Nucleotide may be methylated to form 5-methylcytosine"
tttgtctggaagatttagactgatttaagggtgacacacagcagagttctagtggacattcgtgttaaccgtttggtgctcagaatggagatggccaaataccaagtgcttagtgacagaaa

SEQ ID NO: 9887 - DNA, 122 bp, Homo sapiens
  misc_feature (61)..(62): /note="This region represents a CpG dinucleotide"
  misc_feature (61)..(61): /note="Nucleotide may be methylated to form 5-methylcytosine"
cctggctgagagctttccattgttggtgtgagatcctccagattctcttttcacctgtcacgacaacatgcaaatttcaagcgggtgcctgcttgctcagcttgagtcttaattagacagat

SEQ ID NO: 9888 - DNA, 122 bp, Homo sapiens
  misc_feature (61)..(62): /note="This region represents a CpG dinucleotide"
  misc_feature (61)..(61): /note="Nucleotide may be methylated to form 5-methylcytosine"
gagctcttagttcagtgacgtcacaagatctgccctgtgtcgttttcatccagatgttagcgtgctcttacagtggacacctgcagatcctgttgctgtgaagcactttgcctctcactcga

SEQ ID NO: 9889 - DNA, 122 bp, Homo sapiens
  misc_feature (61)..(62): /note="This region represents a CpG dinucleotide"
  misc_feature (61)..(61): /note="Nucleotide may be methylated to form 5-methylcytosine"
tgtttgctaaaccctcaatcctgcttttcagtcttggcaagattccccagcatctccagtcgtagttcctaactttgcctaactattaacactctccaatttgatttcactattactgatct

SEQ ID NO: 9890 - DNA, 122 bp, Homo sapiens
  misc_feature (61)..(62): /note="This region represents a CpG dinucleotide"
  misc_feature (61)..(61): /note="Nucleotide may be methylated to form 5-methylcytosine"
ctcaggcagtccacttgccttagcctcccaaagtgctgggattacaggtgtaagccaccacgcccggcctgaacatcttttttgatcttcaaaacagataagggaaagagaggcctgattag

SEQ ID NO: 9891 - DNA, 122 bp, Homo sapiens
  misc_feature (61)..(62): /note="This region represents a CpG dinucleotide"
  misc_feature (61)..(61): /note="Nucleotide may be methylated to form 5-methylcytosine"
catggagaaacccagtgtgaaacagtatgattgtttctgggaggtaccaatgacatataacgtgggagaatgtgacttcactgaactggaagctatgctcctcaaagggtggttactcatac

SEQ ID NO: 9892 - DNA, 122 bp, Homo sapiens
  misc_feature (61)..(62): /note="This region represents a CpG dinucleotide"
  misc_feature (61)..(61): /note="Nucleotide may be methylated to form 5-methylcytosine"
aatacttctaacacacgcaagtaaacccagcagatggaagagacaattctggatccctgacgcctccagactgctggctttggttgggtcatcatgaagagaacagctgcttcctcaatcac

SEQ ID NO: 9893 - DNA, 122 bp, Homo sapiens
  misc_feature (61)..(62): /note="This region represents a CpG dinucleotide"
  misc_feature (61)..(61): /note="Nucleotide may be methylated to form 5-methylcytosine"
cctcactggtctctcaaagccctgcttgatctggctgaaacataccctcccatcagatagcgggtggaggtgctgtcagattaatcttcatgaagctcagctctgaccgtgtatttccctta

SEQ ID NO: 9894 - DNA, 122 bp, Homo sapiens
  misc_feature (61)..(62): /note="This region represents a CpG dinucleotide"
  misc_feature (61)..(61): /note="Nucleotide may be methylated to form 5-methylcytosine"
cagatgacccaatatcccatgacaatgtatgcttctaagctaattacagtcatgctttcacgtacttgcacactaaaataccaaggataggtgtttttttttttttgatggagcttcacttt

SEQ ID NO: 9895 - DNA, 122 bp, Homo sapiens
  misc_feature (61)..(62): /note="This region represents a CpG dinucleotide"
  misc_feature (61)..(61): /note="Nucleotide may be methylated to form 5-methylcytosine"
agagaccagcatggcaggagcaaatgagcgagaggaagagcggtggaagatgaggccagacggttcaatgcatctcgaagggtctggagaccatgtaaagagcttagtctttgtccatttgg

SEQ ID NO: 9896 - DNA, 122 bp, Homo sapiens
  misc_feature (61)..(62): /note="This region represents a CpG dinucleotide"
  misc_feature (61)..(61): /note="Nucleotide may be methylated to form 5-methylcytosine"
gttcgtttcttccctgcacagtggtagggtgaggcattctccccttccctctgctgcatacgcttccagcctgtgttgctttgagcattcagattgagttgctcttgcatttgtgattcttg

SEQ ID NO: 9897 - DNA, 122 bp, Homo sapiens
  misc_feature (61)..(62): /note="This region represents a CpG dinucleotide"
  misc_feature (61)..(61): /note="Nucleotide may be methylated to form 5-methylcytosine"
ctaacaatatatgtgagaactgagttatgacaagtgagtagacattttccagatgggttacgagacaaagggcattttaagcagagacaacagcataagcacaaggccttgcattatggcag

SEQ ID NO: 9898 - DNA, 122 bp, Homo sapiens
  misc_feature (61)..(62): /note="This region represents a CpG dinucleotide"
  misc_feature (61)..(61): /note="Nucleotide may be methylated to form 5-methylcytosine"
cagcactttatttcttttcagtcctttaatcctaatgccagggccttactcataaagcttcgtaaatctgtggccactgaaatatcctctctccacctgccaataacttcttaaacacacat

SEQ ID NO: 9899 - DNA, 122 bp, Homo sapiens
  misc_feature (61)..(62): /note="This region represents a CpG dinucleotide"
  misc_feature (61)..(61): /note="Nucleotide may be methylated to form 5-methylcytosine"
agccctcaggagcgagggagtcacctgcctgtggtactattaagaactccaggcaggctgcgtgagaagattaaaataagccctgggcctgtggttgagccaaaagacttgtacccctcccc

SEQ ID NO: 9900 - DNA, 122 bp, Homo sapiens
  misc_feature (61)..(62): /note="This region represents a CpG dinucleotide"
  misc_feature (61)..(61): /note="Nucleotide may be methylated to form 5-methylcytosine"
attacctggcccaaaatgtcattagctaccaggctgagaaacctgccctcctaggccgggcgctgtggctcacgcccgtaatctcagcatattgggaggccgaggtgggcggatcctgaggt

SEQ ID NO: 9901 - DNA, 122 bp, Homo sapiens
  misc_feature (61)..(62): /note="This region represents a CpG dinucleotide"
  misc_feature (61)..(61): /note="Nucleotide may be methylated to form 5-methylcytosine"
gcaggcaacaaaaccagtatgttagctatgtctgtgactctgtcaccaatgtgggttagccgtatctctgaccctgtcaccaattgcaattacagatgtctccacatcacattagtgttgtt

SEQ ID NO: 9902 - DNA, 122 bp, Homo sapiens
  misc_feature (61)..(62): /note="This region represents a CpG dinucleotide"
  misc_feature (61)..(61): /note="Nucleotide may be methylated to form 5-methylcytosine"
agaacacttggagcacccaccccttccaagcagattctccattaaagccccacaggctgccgtgccacctcaaccctactggggcagactctcaactcgaaacatggaacctgagtcttgga

SEQ ID NO: 9903 - DNA, 122 bp, Homo sapiens
  misc_feature (61)..(62): /note="This region represents a CpG dinucleotide"
  misc_feature (61)..(61): /note="Nucleotide may be methylated to form 5-methylcytosine"
ctacagaactcacacacctaactgctatgccacctctcagccatgctgatgtcaggtagacgttaggtagcatgacaactatcatcaaaacactcccaggggatcttgatttctggaattcc

SEQ ID NO: 9904 - DNA, 122 bp, Homo sapiens
  misc_feature (61)..(62): /note="This region represents a CpG dinucleotide"
  misc_feature (61)..(61): /note="Nucleotide may be methylated to form 5-methylcytosine"
catgtagaccactatttcccaacctgcaagtgcatcatggcctttggtgtgtcagggacacgccttgggtgtgtgtctcagtctaaagcttcctccttttcacaagcttcctgtttctcatc

SEQ ID NO: 9905 - DNA, 122 bp, Homo sapiens
  misc_feature (61)..(62): /note="This region represents a CpG dinucleotide"
  misc_feature (61)..(61): /note="Nucleotide may be methylated to form 5-methylcytosine"
gactacaagcgtgagtcaccatgcccagcccaattcctttgcttaaagaattcagatgagcgtagtgtttattattttttctgtccatgtctgttccagtcatgaacttcaagagttaccta

SEQ ID NO: 9906 - DNA, 122 bp, Homo sapiens
  misc_feature (61)..(62): /note="This region represents a CpG dinucleotide"
  misc_feature (61)..(61): /note="Nucleotide may be methylated to form 5-methylcytosine"
gaatctgttgaaagagatgcgccctgaaaaaggaggataaaaccaagaaagaagacgacacgggatccaggaaataagagatttagcacagaaagaaaaagtaaaataaccctgtcgatcgt

SEQ ID NO: 9907 - DNA, 122 bp, Homo sapiens
  misc_feature (61)..(62): /note="This region represents a CpG dinucleotide"
  misc_feature (61)..(61): /note="Nucleotide may be methylated to form 5-methylcytosine"
tgtgtctctattacagaaactcccagaacagtccattgttttattcccctccctgtgatgcggtgaatactgtgagaacaagaacagtgccttacacaccttcccaaccctcaggcctagca

SEQ ID NO: 9908 - DNA, 122 bp, Homo sapiens
  misc_feature (61)..(62): /note="This region represents a CpG dinucleotide"
  misc_feature (61)..(61): /note="Nucleotide may be methylated to form 5-methylcytosine"
gcagaatgagcaagatcaccgctcagatgtgtcatgaggagtaacgtgtcatgacaccggcgtgtgaagcttcagcgaaaagcccagtcttgagcgtggtcacgagtcattacttcgtggtg

SEQ ID NO: 9909 - DNA, 122 bp, Homo sapiens
  misc_feature (61)..(62): /note="This region represents a CpG dinucleotide"
  misc_feature (61)..(61): /note="Nucleotide may be methylated to form 5-methylcytosine"
aggattaaatgagctcattcacatagagtgcttagcacaatgcctggtacataccaaacacgcaataactgttaatagttacttagtagtcacagctcagaaatcaggattggcactacctg

SEQ ID NO: 9910 - DNA, 122 bp, Homo sapiens
  misc_feature (61)..(62): /note="This region represents a CpG dinucleotide"
  misc_feature (61)..(61): /note="Nucleotide may be methylated to form 5-methylcytosine"
taatcatagactgtttgaggttgatttggtctaagcgagggacaattttgaggattcaaacgacaaaaagaaggcagaagagttatctcttgagactgctctccggagacctgcccttgctt

SEQ ID NO: 9911 - DNA, 122 bp, Homo sapiens
  misc_feature (61)..(62): /note="This region represents a CpG dinucleotide"
  misc_feature (61)..(61): /note="Nucleotide may be methylated to form 5-methylcytosine"
ctcttgcttttgatttggtgttactggattcctttgagtcactaacatctttatgttgatcgcataacaggcagattagtaccactataacttcatgagtaacaacctcaaatgggtacttt

SEQ ID NO: 9912 - DNA, 122 bp, Homo sapiens
  misc_feature (61)..(62): /note="This region represents a CpG dinucleotide"
  misc_feature (61)..(61): /note="Nucleotide may be methylated to form 5-methylcytosine"
gagtttattaggactcacatgtggggcactcgtgggcagcaggacaactctagagatgagcgtgcttctgtccctaagctgcttttgagctaattttctgcctctttgcgccgtctgtgtga

SEQ ID NO: 9913 - DNA, 122 bp, Homo sapiens
  misc_feature (61)..(62): /note="This region represents a CpG dinucleotide"
  misc_feature (61)..(61): /note="Nucleotide may be methylated to form 5-methylcytosine"
gaagtttcccttctctgtggcgttaatgcatcttgtcagctgaagagaaggcctgcttggcgggttaccatgaacatttctctttggtgttcctgctgattctgcaggagggaatcaggcaa

SEQ ID NO: 9914 - DNA, 122 bp, Homo sapiens
  misc_feature (61)..(62): /note="This region represents a CpG dinucleotide"
  misc_feature (61)..(61): /note="Nucleotide may be methylated to form 5-methylcytosine"
gcactttgctgatgcatgtgggaaagctcacagatgccagggcctggcttccagcactagcgacaatagtaatgacttaagagagatatttattttgtgtatttactcagatgtttggaaat

SEQ ID NO: 9915 - DNA, 122 bp, Homo sapiens
  misc_feature (61)..(62): /note="This region represents a CpG dinucleotide"
  misc_feature (61)..(61): /note="Nucleotide may be methylated to form 5-methylcytosine"
aaaggatatctatgagtaattgtatttgataatcttagtgaaaggattattttaaacaaccgctgctaagaaggtgactgatttgagttcatctctgggcttcccctttggctaaaatgcta

SEQ ID NO: 9916 - DNA, 122 bp, Homo sapiens
  misc_feature (61)..(62): /note="This region represents a CpG dinucleotide"
  misc_feature (61)..(61): /note="Nucleotide may be methylated to form 5-methylcytosine"
tgaaaatatgagttagtagtgaggaatgttctgactcgactaggcattctctagcatcaccgcagcttagacagggaggggcagcttgttactgtcaggtgaggataaagccagattatctc

SEQ ID NO: 9917 - DNA, 122 bp, Homo sapiens
  misc_feature (61)..(62): /note="This region represents a CpG dinucleotide"
  misc_feature (61)..(61): /note="Nucleotide may be methylated to form 5-methylcytosine"
acctcaggtgatccacctgccttagcctcccaaagtgctgggattacaggcatgagccaccgtgcccagcggccaaaccctaggtttttagttgccagggaattctcagacacaggtggaag

SEQ ID NO: 9918 - DNA, 122 bp, Homo sapiens
  misc_feature (61)..(62): /note="This region represents a CpG dinucleotide"
  misc_feature (61)..(61): /note="Nucleotide may be methylated to form 5-methylcytosine"
ctccagtgatgacacagattatgctgaaaggaagaatagtgttaacagaactggcttggacgagggcagaactagaaagaatccagactctgacactccaagttgtgtgaccttgacctagt

SEQ ID NO: 9919 - DNA, 122 bp, Homo sapiens
  misc_feature (61)..(62): /note="This region represents a CpG dinucleotide"
  misc_feature (61)..(61): /note="Nucleotide may be methylated to form 5-methylcytosine"
actccacgatgactactggaaaaacaactcaacaaactccagcaacagcaggttcgtaatcgctatttggagttggaatttcaacatgtatttatggctctgacatcggatgacaaaataat

SEQ ID NO: 9920 - DNA, 122 bp, Homo sapiens
  misc_feature (61)..(62): /note="This region represents a CpG dinucleotide"
  misc_feature (61)..(61): /note="Nucleotide may be methylated to form 5-methylcytosine"
ggtgattcagacaacagtaatgcagtgatccagggcccagggcaagctggctgtaaggaacgggtgcggggcctcacaggtgctgccggcctggacagggaagacaagggcctgggatcagc

SEQ ID NO: 9921 - DNA, 122 bp, Homo sapiens
  misc_feature (61)..(62): /note="This region represents a CpG dinucleotide"
  misc_feature (61)..(61): /note="Nucleotide may be methylated to form 5-methylcytosine"
caaattccatttccagagcactttacctttcccatctactaaatcagttacaataaagcacgtcttaaatccatatactcctgctggaaatctcaacccaagccatcaatgcctgttcgggt

SEQ ID NO: 9922 - DNA, 122 bp, Homo sapiens
  misc_feature (61)..(62): /note="This region represents a CpG dinucleotide"
  misc_feature (61)..(61): /note="Nucleotide may be methylated to form 5-methylcytosine"
tgaagaaagtatcttcagggaaaagaacactagtgaggggttaagatgaggatcaggaaccgaccaggtattcagcaattagaatgtgactagtggagaagagtagatttagcagtctggag

SEQ ID NO: 9923 - DNA, 122 bp, Homo sapiens
  misc_feature (61)..(62): /note="This region represents a CpG dinucleotide"
  misc_feature (61)..(61): /note="Nucleotide may be methylated to form 5-methylcytosine"
ctccaaccagttctgcaactgccctgagtctgtgtcttagcaaagaggccattagccacccgactccctggcttatcactgggcccttcctcatcagacacagagatcaaattctgagggtg

SEQ ID NO: 9924 - DNA, 122 bp, Homo sapiens
  misc_feature (61)..(62): /note="This region represents a CpG dinucleotide"
  misc_feature (61)..(61): /note="Nucleotide may be methylated to form 5-methylcytosine"
ctgccactccaccacttcatggagtcagctcatctacaccacgggccaaacacttctggacgggagaccagatataaattaaggcaaggctgctgctgtcagatacatccccacctctccac

SEQ ID NO: 9925 - DNA, 122 bp, Homo sapiens
  misc_feature (61)..(62): /note="This region represents a CpG dinucleotide"
  misc_feature (61)..(61): /note="Nucleotide may be methylated to form 5-methylcytosine"
cagtgagaactgactcagaggtgacttccaaggccaacctggggtgatctggctgagtctcggaccagtctcaagtgctgtggaaggtcatgagagtggcaaggctgaacctcaagaccagt

SEQ ID NO: 9926 - DNA, 122 bp, Homo sapiens
  misc_feature (61)..(62): /note="This region represents a CpG dinucleotide"
  misc_feature (61)..(61): /note="Nucleotide may be methylated to form 5-methylcytosine"
ttaattggtttgtagtctaagctgcctctgtttcacaaagcttttgtagcaagctgttttcgcaagtcactgaccagcctacagattggctttttctgggtcaggtgtcttctctgtaccaa

SEQ ID NO: 9927 - DNA, 122 bp, Homo sapiens
  misc_feature (61)..(62): /note="This region represents a CpG dinucleotide"
  misc_feature (61)..(61): /note="Nucleotide may be methylated to form 5-methylcytosine"
ctttattttgttgagtttattcagagtatttaatcatgaaaaggtattgtcaacataaaacgtggtgccagatggactaggttagcacaatgtttaatgctattattgcatattttggggat

SEQ ID NO: 9928 - DNA, 122 bp, Homo sapiens
  misc_feature (61)..(62): /note="This region represents a CpG dinucleotide"
  misc_feature (61)..(61): /note="Nucleotide may be methylated to form 5-methylcytosine"
tatacaacagagacattttacctgccatgaagagtcattacaggaacttgccttgcaacacgtctagaatagtccttaacacacaataaatgagcactaagtgctactattttccttccact

SEQ ID NO: 9929 - DNA, 122 bp, Homo sapiens
  misc_feature (61)..(62): /note="This region represents a CpG dinucleotide"
  misc_feature (61)..(61): /note="Nucleotide may be methylated to form 5-methylcytosine"
actgggtttagagaggctaaataattgacccatgattaatactggtgatgatgatgtttacgactgaatacttattgtatgcccagccctgtactgagtcctttatatacatgatctccatt

SEQ ID NO: 9930 - DNA, 122 bp, Homo sapiens
  misc_feature (61)..(62): /note="This region represents a CpG dinucleotide"
  misc_feature (61)..(61): /note="Nucleotide may be methylated to form 5-methylcytosine"
ctatcacatccttgtttagcaatgatcatccttttgcattacaaactagaaaagcaactccgtaagactaacaaactctcttcaaccaagtaaaggagactccttgtggaggggagcccctg

SEQ ID NO: 9931 - DNA, 122 bp, Homo sapiens
  misc_feature (61)..(62): /note="This region represents a CpG dinucleotide"
  misc_feature (61)..(61): /note="Nucleotide may be methylated to form 5-methylcytosine"
ataatcattctaagactaaggttatcctgaacaaactatggttatctccacccccaataccgtaatcataatgacaactacagcattcacctaatgcctagcagttttaaaagtactttcct

SEQ ID NO: 9932 - DNA, 122 bp, Homo sapiens
  misc_feature (61)..(62): /note="This region represents a CpG dinucleotide"
  misc_feature (61)..(61): /note="Nucleotide may be methylated to form 5-methylcytosine"
atgaaaatcttctttcattgtcattagacaaggtgcccctgccctattaaaggaacacaccggaacgatcgtgcaggtcataaatggttgatcttggagtttggcatgacctgcgcttcacg

SEQ ID NO: 9933 - DNA, 122 bp, Homo sapiens
  misc_feature (61)..(62): /note="This region represents a CpG dinucleotide"
  misc_feature (61)..(61): /note="Nucleotide may be methylated to form 5-methylcytosine"
ccctgtgcctctggctgggtggcaactttgtgccttcatagtctaaaaacgcaccctcagcgttgcagccccaataggactcagttgatgaacaactttccaggaacgtggctcttgtgtga

SEQ ID NO: 9934 - DNA, 122 bp, Homo sapiens
  misc_feature (61)..(62): /note="This region represents a CpG dinucleotide"
  misc_feature (61)..(61): /note="Nucleotide may be methylated to form 5-methylcytosine"
ttgaagtgatactgagtatgaatcatcctctctgaactgcgtcacagaattacccactgtcgggaaacttaaagatagtttcagtgtttaaaaattctcaggaaattctttcaaatgttcaa

SEQ ID NO: 9935 - DNA, 122 bp, Homo sapiens
  misc_feature (61)..(62): /note="This region represents a CpG dinucleotide"
  misc_feature (61)..(61): /note="Nucleotide may be methylated to form 5-methylcytosine"
tgacttttttactgcaaactggttccttcatacaggttaagaatagacccaccagcatttcgtgggatggtcttgattcagggaagctctacaccttggtcctgacagacccggatgctccc

SEQ ID NO: 9936 - DNA, 122 bp, Homo sapiens
  misc_feature (61)..(62): /note="This region represents a CpG dinucleotide"
  misc_feature (61)..(61): /note="Nucleotide may be methylated to form 5-methylcytosine"
tttctgaagaaggttacagaatcttcttcagagatcttagggaaaaaaaaaaaagattgtcgtgagagttgaaaatcctgccattgtaaccagttgatctacggtttctgattctgtcatgc

SEQ ID NO: 9937 - DNA, 122 bp, Homo sapiens
  misc_feature (61)..(62): /note="This region represents a CpG dinucleotide"
  misc_feature (61)..(61): /note="Nucleotide may be methylated to form 5-methylcytosine"
ggcagtgtgtggtctgtgaggtcagagcaattctagaaaaacaacttggatgtggttgatcgatattctggatccagtcatggcttgcaaagaaaatagctgtatttggaatgaagaggact

SEQ ID NO: 9938 - DNA, 122 bp, Homo sapiens
  misc_feature (61)..(62): /note="This region represents a CpG dinucleotide"
  misc_feature (61)..(61): /note="Nucleotide may be methylated to form 5-methylcytosine"
ttgccagccacttctacgtaaatatatctggttctacccttcactcagccaaggcatgggcgctactggcctctgactcagcgctcttcattggcctcagctgttaaacttgctcccttctg

SEQ ID NO: 9939 - DNA, 122 bp, Homo sapiens
  misc_feature (61)..(62): /note="This region represents a CpG dinucleotide"
  misc_feature (61)..(61): /note="Nucleotide may be methylated to form 5-methylcytosine"
gactgagcacatagctaaagccttaattatttgggaggtgagggggaagggaggtttgaccggaacaagtaaaacctgtatcccactgcttttccggtgaatgtgggtaaatccccacccac

SEQ ID NO: 9940 - DNA, 122 bp, Homo sapiens
  misc_feature (61)..(62): /note="This region represents a CpG dinucleotide"
  misc_feature (61)..(61): /note="Nucleotide may be methylated to form 5-methylcytosine"
gtgatcctcccacctcagtctcccaaagagctgggattacaggcataagccaccttgccccgccagtttttagcctgtcagctctttgagggacacttgttatggtcatacccacagctttg

SEQ ID NO: 9941 - DNA, 122 bp, Homo sapiens
  misc_feature (61)..(62): /note="This region represents a CpG dinucleotide"
  misc_feature (61)..(61): /note="Nucleotide may be methylated to form 5-methylcytosine"
gacctcctggtatttcatataattaaagtaggcaaagcgatctgcttaaatcctctactacgctgaaatattcttaaaacactattactcaaattttgctcacacatgagtcatttatggaa

SEQ ID NO: 9942 - DNA, 122 bp, Homo sapiens
  misc_feature (61)..(62): /note="This region represents a CpG dinucleotide"
  misc_feature (61)..(61): /note="Nucleotide may be methylated to form 5-methylcytosine"
agtaggatcaggcaaataaaactagttggacagcagacatatcatgaactcttgcaacagcgtgttatctgtgtgcatgtctaaagtgttatactgattcactattacaataaggatcatgc

SEQ ID NO: 9943 - DNA, 122 bp, Homo sapiens
  misc_feature (61)..(62): /note="This region represents a CpG dinucleotide"
  misc_feature (61)..(61): /note="Nucleotide may be methylated to form 5-methylcytosine"
gtacactgtattttttgtggaagatcattttccatcttaaaatatatactggttgagttacgtttacattgctccataggacaatcccatgagtacattataagtcctcgatggctgttgta

SEQ ID NO: 9944 - DNA, 122 bp, Homo sapiens
  misc_feature (61)..(62): /note="This region represents a CpG dinucleotide"
  misc_feature (61)..(61): /note="Nucleotide may be methylated to form 5-methylcytosine"
caaggacaaaatgagcaaacctagctgagtcagggccctctaaagagtcttcctggaaatcgtattcaacactttcacttaatttggccagaactcaatcatgtgactatagctagctataa

SEQ ID NO: 9945 - DNA, 122 bp, Homo sapiens
  misc_feature (61)..(62): /note="This region represents a CpG dinucleotide"
  misc_feature (61)..(61): /note="Nucleotide may be methylated to form 5-methylcytosine"
tcaaaggacgaggcttcaccctttatgctactgaattccatttatctccttattactcaccgtccacacctatgatcattgactgatttaaaatctccccacctcccccagtcacttttcat

SEQ ID NO: 9946 - DNA, 122 bp, Homo sapiens
  misc_feature (61)..(62): /note="This region represents a CpG dinucleotide"
  misc_feature (61)..(61): /note="Nucleotide may be methylated to form 5-methylcytosine"
cacatccattcaggacaggaagtgcatgatgtgactcacgagcagagggaaagggaattgcgctcagctggtaaaggcaaagaaagaacaaatagaggctatagccaccaagaagaagaaga

SEQ ID NO: 9947 - DNA, 122 bp, Homo sapiens
  misc_feature (61)..(62): /note="This region represents a CpG dinucleotide"
  misc_feature (61)..(61): /note="Nucleotide may be methylated to form 5-methylcytosine"
tgaagtttctctttagatctttgtttccttcccctgagttctgcattttcttcccatgtacgtgtgccgtggaggagaatgaaaagaggaaatggcacaaaagtgaaccttgttgggtggct

SEQ ID NO: 9948 - DNA, 122 bp, Homo sapiens
  misc_feature (61)..(62): /note="This region represents a CpG dinucleotide"
  misc_feature (61)..(61): /note="Nucleotide may be methylated to form 5-methylcytosine"
tgggactcagcctctgtatgttgaaaagcctagactagcctgcagaataatgagacattacgtgggccagtgcgagtcatttctgttactgtctgtgagaacacttagccaaaatctgcaaa

SEQ ID NO: 9949 - DNA, 122 bp, Homo sapiens
  misc_feature (61)..(62): /note="This region represents a CpG dinucleotide"
  misc_feature (61)..(61): /note="Nucleotide may be methylated to form 5-methylcytosine"
tggagccactattgtctgtaaaaggtacaactacgctgctgacgctgtacatacatcttgcgctcatggctcatggccagagagagagtaaatccatgttgaaactgtctacagttcctcac

SEQ ID NO: 9950 - DNA, 122 bp, Homo sapiens
  misc_feature (61)..(62): /note="This region represents a CpG dinucleotide"
  misc_feature (61)..(61): /note="Nucleotide may be methylated to form 5-methylcytosine"
attaaagagacaactcatttctagtcacctctctgcaggtctccagcagctctgctatgacgtaggtgaatcatccttctccccaacttgttttattttccttagtatgtgctagtcatgtt

SEQ ID NO: 9951 - DNA, 122 bp, Homo sapiens
  misc_feature (61)..(62): /note="This region represents a CpG dinucleotide"
  misc_feature (61)..(61): /note="Nucleotide may be methylated to form 5-methylcytosine"
ggcctggattaagttttaatataaacaccagtggccttactgcccgcataaataggcctccggcctctcttcaacacctgtgtgctgctcccagcgctcatctctgttctgcccccagggta

SEQ ID NO: 9952 - DNA, 122 bp, Homo sapiens
  misc_feature (61)..(62): /note="This region represents a CpG dinucleotide"
  misc_feature (61)..(61): /note="Nucleotide may be methylated to form 5-methylcytosine"
tgctatggtactcagttacgtaattaaacagtaatctaggtgttgccgggaaggctatttcgcagatgtggttgacatctatcataagttggcttcaagtaaaggagattaccctcaaaatt

SEQ ID NO: 9953 - DNA, 122 bp, Homo sapiens
  misc_feature (61)..(62): /note="This region represents a CpG dinucleotide"
  misc_feature (61)..(61): /note="Nucleotide may be methylated to form 5-methylcytosine"
ccaagggaaaaacctctcaataccaggtccaggagcagctggatgggatcactcagaacccggccgagagctaattccctcttggcttcaaaatccatcctatgcttggagatgctggggct

SEQ ID NO: 9954 - DNA, 122 bp, Homo sapiens
  misc_feature (61)..(62): /note="This region represents a CpG dinucleotide"
  misc_feature (61)..(61): /note="Nucleotide may be methylated to form 5-methylcytosine"
tatttgcagttcctgtctttgcagttctcctctcttccttgtatgggcacaggtgactctcgcaaacctagatccctgggaaagccaatcaagaaaataaagcacagccttgtcctttttct

SEQ ID NO: 9955 - DNA, 122 bp, Homo sapiens
  misc_feature (61)..(62): /note="This region represents a CpG dinucleotide"
  misc_feature (61)..(61): /note="Nucleotide may be methylated to form 5-methylcytosine"
taggttcagtacccatctctgaacccattgctttctccaggggaaggaattgtaccaatccgcttaggtctagacagcatgcctggacaggactagctcctcagaagcacctgggctgcctg

SEQ ID NO: 9956 - DNA, 122 bp, Homo sapiens
  misc_feature (61)..(62): /note="This region represents a CpG dinucleotide"
  misc_feature (61)..(61): /note="Nucleotide may be methylated to form 5-methylcytosine"
aaatgctttacacatattaacttaatcctcccagcaattcttgaggatatttactattaccgtcattcccatttcacaggtgaagaaggggactaagttaataagttgcccctgtcatgtaa

SEQ ID NO: 9957 - DNA, 122 bp, Homo sapiens
  misc_feature (61)..(62): /note="This region represents a CpG dinucleotide"
  misc_feature (61)..(61): /note="Nucleotide may be methylated to form 5-methylcytosine"
tagccaaaaagcaacaagtcaatctaccatgtctgcagtctggcaggcaatgcaggaacccgcagggcaactctgaacagcattctagagaccaaattaagccagctgggctgactacagca

SEQ ID NO: 9958 - DNA, 122 bp, Homo sapiens
  misc_feature (61)..(62): /note="This region represents a CpG dinucleotide"
  misc_feature (61)..(61): /note="Nucleotide may be methylated to form 5-methylcytosine"
caagattgcacagcaggttgtggcagagcccaaacctgctatatgactttcagtggctgccgcaaaaattaccaccaactaggtggcttcaaacaatggaaatgttatttattaattaatgt

SEQ ID NO: 9959 - DNA, 122 bp, Homo sapiens
  misc_feature (61)..(62): /note="This region represents a CpG dinucleotide"
  misc_feature (61)..(61): /note="Nucleotide may be methylated to form 5-methylcytosine"
ggaggcaggggaagggcacctaagtatcagaattactgcccacacccgctattccctgaacgcacacccacactggaactgccaccgtgatgagccacctgtttcagaggaagtgggtcaaa

SEQ ID NO: 9960 - DNA, 122 bp, Homo sapiens
  misc_feature (61)..(62): /note="This region represents a CpG dinucleotide"
  misc_feature (61)..(61): /note="Nucleotide may be methylated to form 5-methylcytosine"
ctcttggtcctgtggctctgcattggcctgccagaatcaacaatgatgtctgggagctgacgtgtcttggctgaagtcagcattcaaggcgattatctaggtcactgcagcctagagcagct

SEQ ID NO: 9961 - DNA, 122 bp, Homo sapiens
  misc_feature (61)..(62): /note="This region represents a CpG dinucleotide"
  misc_feature (61)..(61): /note="Nucleotide may be methylated to form 5-methylcytosine"
ctcaaggcaaattctatctggtagaggaaacaagtctccttagtgttctagccactataacgtagagtagaaagtcagcaggtgaagaaatcatattaccattttgctgttctgcttattaa

SEQ ID NO: 9962 - DNA, 122 bp, Homo sapiens
  misc_feature (61)..(62): /note="This region represents a CpG dinucleotide"
  misc_feature (61)..(61): /note="Nucleotide may be methylated to form 5-methylcytosine"
ggatttaaagtgtcagaaaactttttattgagcacctactgtatgaggcatcattctctccgtggggaagatcataatgaacaaggccaacaccctgtccttatggaactatgcattaagag

SEQ ID NO: 9963 - DNA, 122 bp, Homo sapiens
  misc_feature (61)..(62): /note="This region represents a CpG dinucleotide"
  misc_feature (61)..(61): /note="Nucleotide may be methylated to form 5-methylcytosine"
tataaacccaaaggctcctcccttccctgcctctggtagcccctcccttctcacttactacgcagctgaccagagaaaagacaaggggtgggaaggcactgagcaggactgagtggggagta

SEQ ID NO: 9964 - DNA, 122 bp, Homo sapiens
  misc_feature (61)..(62): /note="This region represents a CpG dinucleotide"
  misc_feature (61)..(61): /note="Nucleotide may be methylated to form 5-methylcytosine"
catggcattcattcattcatccaacacatattgattgagtgctggcactcgcaggcattgcgctggggttgaggacacagcagatgaacaggacagaccagcttctattctcacggtgcttg

SEQ ID NO: 9965 - DNA, 122 bp, Homo sapiens
  misc_feature (61)..(62): /note="This region represents a CpG dinucleotide"
  misc_feature (61)..(61): /note="Nucleotide may be methylated to form 5-methylcytosine"
catccctcttcagacctagaattccaccttccaattactttcttgatgcatctgaaaggccgtctctgaaacagcaaagtgcaataattagtcattatgtattcaaggcaaatttgtcttac

SEQ ID NO: 9966 - DNA, 122 bp, Homo sapiens
  misc_feature (61)..(62): /note="This region represents a CpG dinucleotide"
  misc_feature (61)..(61): /note="Nucleotide may be methylated to form 5-methylcytosine"
gtcgattttaaacatgttcctctggtgatgctgttattctctccagtttgagaaccaccacgtcagaggcgtcttcctgtctgaaccattctttcctgctgctctcaggaaggcagaaaggt

SEQ ID NO: 9967 - DNA, 122 bp, Homo sapiens
  misc_feature (61)..(62): /note="This region represents a CpG dinucleotide"
  misc_feature (61)..(61): /note="Nucleotide may be methylated to form 5-methylcytosine"
ttcccaagcactctgagccctctctcatcagtcacgaggagaggagaaagtgctggactacgagcacaaaggcctggctctgacacaactgctgtgtgacactgagcaagtcctgccctctc

SEQ ID NO: 9968 - DNA, 122 bp, Homo sapiens
  misc_feature (61)..(62): /note="This region represents a CpG dinucleotide"
  misc_feature (61)..(61): /note="Nucleotide may be methylated to form 5-methylcytosine"
ggcagtttatctctctaagagcatcccactcccggtgatacgcccagctctgacacatcacgcacgattgttattcatcatctggtcactgggtttaaggcacagctcagccacttattaac

SEQ ID NO: 9969 - DNA, 122 bp, Homo sapiens
  misc_feature (61)..(62): /note="This region represents a CpG dinucleotide"
  misc_feature (61)..(61): /note="Nucleotide may be methylated to form 5-methylcytosine"
ctgggttaagtgctcatgagtcacagagaacctgccttagatctcagtttcagtgactttcgtcagagagataattggagggattctctaaccggttgtcaagggctctctttcttgattgg

SEQ ID NO: 9970 - DNA, 122 bp, Homo sapiens
  misc_feature (61)..(62): /note="This region represents a CpG dinucleotide"
  misc_feature (61)..(61): /note="Nucleotide may be methylated to form 5-methylcytosine"
ctcaggtgatccgcctgccttagcttcccaaagtgctgggattacaggcgtgagccactgcgcccggcttcattgttattatgtaatgattcagcagttattatcaactggggttggaatca

SEQ ID NO: 9971 - DNA, 122 bp, Homo sapiens
  misc_feature (61)..(62): /note="This region represents a CpG dinucleotide"
  misc_feature (61)..(61): /note="Nucleotide may be methylated to form 5-methylcytosine"
ctctccctaaaagggtgggattggatttggaggtgggaggagaatctgcaatggagttaccgacaccatgtaaggaaaaccttggaggctgctattcccatttggagggatcagcaaaaagg

SEQ ID NO: 9972 - DNA, 122 bp, Homo sapiens
  misc_feature (61)..(62): /note="This region represents a CpG dinucleotide"
  misc_feature (61)..(61): /note="Nucleotide may be methylated to form 5-methylcytosine"
aaattaaaaatgtctggtttttaatccaataatattttcctgaacacattaaggctattacgtacacatggcatgccatctctgcagtttggagaattagtaagagagtcctactcttgcaa

SEQ ID NO: 9973 - DNA, 122 bp, Homo sapiens
  misc_feature (61)..(62): /note="This region represents a CpG dinucleotide"
  misc_feature (61)..(61): /note="Nucleotide may be methylated to form 5-methylcytosine"
gtgtcccctttattggcaaggggcctgatgctctctgccttctctcatgagtgtctttcacgctaacgtgtacaagattgccaaaagcatagggagtttccactttggacaatgagggtttg

SEQ ID NO: 9974 - DNA, 122 bp, Homo sapiens
  misc_feature (61)..(62): /note="This region represents a CpG dinucleotide"
  misc_feature (61)..(61): /note="Nucleotide may be methylated to form 5-methylcytosine"
atgatttgagtggtttcttctgcaatttttgcaaggaactatgctgcctctgccaggcatcgctgagcagaagtcagagtggcccctgcctccaccagcctgaggctacacacaggattctg

SEQ ID NO: 9975 - DNA, 122 bp, Homo sapiens
  misc_feature (61)..(62): /note="This region represents a CpG dinucleotide"
  misc_feature (61)..(61): /note="Nucleotide may be methylated to form 5-methylcytosine"
catccttaagtacatgtacaagtatcactctgaaaagagcaccttaattctcttttcttccgaatggcctttaacagttctttttcttcaaacattccaggaaacaccagaaccatctggca

SEQ ID NO: 9976 - DNA, 122 bp, Homo sapiens
  misc_feature (61)..(62): /note="This region represents a CpG dinucleotide"
  misc_feature (61)..(61): /note="Nucleotide may be methylated to form 5-methylcytosine"
gaactaaataaaagagctcccacatgaaaattgttatgtgaaaaattctagaagacaaagcggtgtccagtatttgtacaggtaagatgacttcagatggaaccaaggcaaacctgttttgc

SEQ ID NO: 9977 - DNA, 122 bp, Homo sapiens
  misc_feature (61)..(62): /note="This region represents a CpG dinucleotide"
  misc_feature (61)..(61): /note="Nucleotide may be methylated to form 5-methylcytosine"
aagagtgggcttagtgaatgggtggtcagaatgcatttacgtttttcattgaagccttgccgctatttccctgctgccttggatgatccaggaaactaagtgtttgaacagtgagctcactc

SEQ ID NO: 9978 - DNA, 122 bp, Homo sapiens
  misc_feature (61)..(62): /note="This region represents a CpG dinucleotide"
  misc_feature (61)..(61): /note="Nucleotide may be methylated to form 5-methylcytosine"
aggaaatctctcaaaggagcttcatgctctctgtgactcagggtagcagtatatggccttcggcacccactgtgggctgggctatggcagactttgcttgccctcattgctctctttgcttt

SEQ ID NO: 9979 - DNA, 122 bp, Homo sapiens
  misc_feature (61)..(62): /note="This region represents a CpG dinucleotide"
  misc_feature (61)..(61): /note="Nucleotide may be methylated to form 5-methylcytosine"
ttcagagcttccctccttcccatgagaggctgaacaattaattgccactttaaacaatagcgcattctttttttttttttttacagtaaacgttgggaacagctgcaagggagggaaggctg

SEQ ID NO: 9980 - DNA, 122 bp, Homo sapiens
  misc_feature (61)..(62): /note="This region represents a CpG dinucleotide"
  misc_feature (61)..(61): /note="Nucleotide may be methylated to form 5-methylcytosine"
ttcccagccctcctgatctcaggtcttcagtagccagtcacaagcagatgtggtgctcctcgtccccacgctgtgtcatcaggaatagggcgttaatcttgagggatttggggccagcagac

SEQ ID NO: 9981 - DNA, 122 bp, Homo sapiens
  misc_feature (61)..(62): /note="This region represents a CpG dinucleotide"
  misc_feature (61)..(61): /note="Nucleotide may be methylated to form 5-methylcytosine"
tggcattgtacagcccacagccaaatctggcctgtttttataaataacacttcatgaagccgcagccacactcattcatttacatactgtctatggttactttcacatcaccacagctaagc

SEQ ID NO: 9982 - DNA, 122 bp, Homo sapiens
  misc_feature (61)..(62): /note="This region represents a CpG dinucleotide"
  misc_feature (61)..(61): /note="Nucleotide may be methylated to form 5-methylcytosine"
tcctgctttgcctgactcctgccatttaatggtaattaaaataaaatgatgggccggcaccgtggctcacgcctattaatcttggcactatgtgaggcctgaggcaggcttaagcctaggag

SEQ ID NO: 9983 - DNA, 122 bp, Homo sapiens
  misc_feature (61)..(62): /note="This region represents a CpG dinucleotide"
  misc_feature (61)..(61): /note="Nucleotide may be methylated to form 5-methylcytosine"
ctgtactataaaataagattcatctataaaactcttgccatgctcaaagccagcttaatgcggttaagattagaaaaaggggcagataatcttcaagttaaaaggaagaagaagtaggccag

SEQ ID NO: 9984 - DNA, 122 bp, Homo sapiens
  misc_feature (61)..(62): /note="This region represents a CpG dinucleotide"
  misc_feature (61)..(61): /note="Nucleotide may be methylated to form 5-methylcytosine"
ctgtctcattaggctgcagccacctgcaggtttgactggggctggtgggtctgctcccaacgtgacttgctcactgctggtgttggcagaaggctgtggctcctcattgtggggactctcca

SEQ ID NO: 9985 - DNA, 122 bp, Homo sapiens
  misc_feature (61)..(62): /note="This region represents a CpG dinucleotide"
  misc_feature (61)..(61): /note="Nucleotide may be methylated to form 5-methylcytosine"
tgcccaaggccaagtagtacacaagtgtggtggccagaactagaatttggacttttccagcggacgtgatagctagctgtgggccatctgtcttaggataaacccaccatcaatgttaattc

SEQ ID NO: 9986 - DNA, 122 bp, Homo sapiens
  misc_feature (61)..(62): /note="This region represents a CpG dinucleotide"
  misc_feature (61)..(61): /note="Nucleotide may be methylated to form 5-methylcytosine"
taattctctttggcttaattttaatgccacagacttatctgtgcattccctttgttctatcgtggcttagttctaaggtgagaagaagaatctaggtaaggattgactaaagaaaatgacac

SEQ ID NO: 9987 - DNA, 122 bp, Homo sapiens
  misc_feature (61)..(62): /note="This region represents a CpG dinucleotide"
  misc_feature (61)..(61): /note="Nucleotide may be methylated to form 5-methylcytosine"
tctctgtggccgtgaagtgtatgcatgcgtgcccatgttgatgcggcgccgtgcgggaggcgggcatcccctgctgtacatgggagggaggctgtctgtgcagagcattgcccagttgccat

SEQ ID NO: 9988 - DNA, 122 bp, Homo sapiens
  misc_feature (61)..(62): /note="This region represents a CpG dinucleotide"
  misc_feature (61)..(61): /note="Nucleotide may be methylated to form 5-methylcytosine"
gcagatttaaaaagaatggcatatacgcctacaggtgcacagagctacatgtgtgactcacgctgcggtatgtggtttcatgagaagttacttatgaaatcattgctgatttctgatcctca

SEQ ID NO: 9989 - DNA, 122 bp, Homo sapiens
  misc_feature (61)..(62): /note="This region represents a CpG dinucleotide"
  misc_feature (61)..(61): /note="Nucleotide may be methylated to form 5-methylcytosine"
attcaaacctgggtcagcatggaaaccacacccaggctctcaagccctggccatgggaaacgcagcattgaacaggggctaagggagccctgttgtgaatcccagcaccacccagtaaccat

SEQ ID NO: 9990 - DNA, 122 bp, Homo sapiens
  misc_feature (61)..(62): /note="This region represents a CpG dinucleotide"
  misc_feature (61)..(61): /note="Nucleotide may be methylated to form 5-methylcytosine"
accgcttgtaaaagtgaaacagtacaaacctaagtcttcagattttgtctcaggaagcaacgcaactcttgtgcgagcaatccatgagcaggaagtggtgaaatactttaaaggtttattga

SEQ ID NO: 9991 - DNA, 122 bp, Homo sapiens
  misc_feature (61)..(62): /note="This region represents a CpG dinucleotide"
  misc_feature (61)..(61): /note="Nucleotide may be methylated to form 5-methylcytosine"
taggcacctggaatccctggcagccagaggaatctgaatccagtgttttcaaggtggagccgcccccacccaggccttgagtcagaaacctgacttccttccattgatgtttttctctgctc

SEQ ID NO: 9992 - DNA, 122 bp, Homo sapiens
  misc_feature (61)..(62): /note="This region represents a CpG dinucleotide"
  misc_feature (61)..(61): /note="Nucleotide may be methylated to form 5-methylcytosine"
aagccactttggtgaaacaaaaagaaaagcatttgtttatttagaacgggcaaaatgatacgtttcagtgggtgttttctttgtactttgatctttttgtactgatatttaagcttctgttt

SEQ ID NO: 9993 - DNA, 122 bp, Homo sapiens
  misc_feature (61)..(62): /note="This region represents a CpG dinucleotide"
  misc_feature (61)..(61): /note="Nucleotide may be methylated to form 5-methylcytosine"
aatgacaagcagggctactgtgctttatcattaaaaagtgcatttcccattacataccctcgccacctcttcaaccacaggcatccctctatcaccaaaaccgaagtgatctcagagagttg

SEQ ID NO: 9994 - DNA, 122 bp, Homo sapiens
  misc_feature (61)..(62): /note="This region represents a CpG dinucleotide"
  misc_feature (61)..(61): /note="Nucleotide may be methylated to form 5-methylcytosine"
gccttattatttcccaatcattgcttaacttgttttcttttacaaattttgcttatcaagcgggaacaaccagaacagtgagtcatgaaaattgatactgacattagcagtaaaagtgctga

SEQ ID NO: 9995 - DNA, 122 bp, Homo sapiens
  misc_feature (61)..(62): /note="This region represents a CpG dinucleotide"
  misc_feature (61)..(61): /note="Nucleotide may be methylated to form 5-methylcytosine"
ggaaagcagatgccccaaaggcagctcttccacacaatcaatgggagccctggggagagccgtgaagtctttgagtctttgtcctggctcccatttctctccaagtaacagacacgagagaa

SEQ ID NO: 9996 - DNA, 122 bp, Homo sapiens
  misc_feature (61)..(62): /note="This region represents a CpG dinucleotide"
  misc_feature (61)..(61): /note="Nucleotide may be methylated to form 5-methylcytosine"
ttaagcatgcattttaattttaactaaacctgccaggagtttgatatgagctccttgttgcgtgcagattgactcacaggattatcagaccaatgactgtaattgagaggaaagaacctagc

SEQ ID NO: 9997 - DNA, 122 bp, Homo sapiens
  misc_feature (61)..(62): /note="This region represents a CpG dinucleotide"
  misc_feature (61)..(61): /note="Nucleotide may be methylated to form 5-methylcytosine"
cgtgatccgcccaccttggcctcccaaagcgctgggattacaggcgtgagccaccgcgcccggccatacatggcaagtttctacatggtgtttcagacttagctgatcaccctctaccctca

SEQ ID NO: 9998 - DNA, 122 bp, Homo sapiens
  misc_feature (61)..(62): /note="This region represents a CpG dinucleotide"
  misc_feature (61)..(61): /note="Nucleotide may be methylated to form 5-methylcytosine"
atctgtgttttaaggcccttccagcaagtctgacatgcttgaaagtttaaaggccaggcacgcctgtaatcccagcattttgggaggccaaggtgggcggatcacttgaggtcaggagttca

SEQ ID NO: 9999 - DNA, 122 bp, Homo sapiens
  misc_feature (61)..(62): /note="This region represents a CpG dinucleotide"
  misc_feature (61)..(61): /note="Nucleotide may be methylated to form 5-methylcytosine"
gctgctctcactgtgttccctcagttaattccacaacaaccctaggaaggaggaacaaggcgtggagggattaagaccttgcccacagccacatacagagctagtgagcatcaatgtcaatg

SEQ ID NO: 10000 - DNA, 122 bp, Homo sapiens
  misc_feature (61)..(62): /note="This region represents a CpG dinucleotide"
  misc_feature (61)..(61): /note="Nucleotide may be methylated to form 5-methylcytosine"
cccttgttaacccacgtctgtgcaaccctgtgtggcagtacaattcctcctcccataggacggagtatctgcacgttcctggtttgcttcagatgcaccttgtgctttctttcccagctgat

SEQ ID NO: 10001 - DNA, 122 bp, Homo sapiens
  misc_feature (61)..(62): /note="This region represents a CpG dinucleotide"
  misc_feature (61)..(61): /note="Nucleotide may be methylated to form 5-methylcytosine"
gtgttttgctttgcaactaagaccgtgacttcctgtttgatggtttgtcacttcacaggccgccacataaaccccataaaagacactctatggtggctgcaaagaaagcactgttaggttct

SEQ ID NO: 10002 - DNA, 122 bp, Homo sapiens
  misc_feature (61)..(62): /note="This region represents a CpG dinucleotide"
  misc_feature (61)..(61): /note="Nucleotide may be methylated to form 5-methylcytosine"
gagttcagtttgcacatgttcagtgcttagcacagggcctggctactgttgttactgctgcggtggttgttaatttcttcacgtgtcgaatgggagcgggagctcctgccctgccagagtcc

SEQ ID NO: 10003 - DNA, 122 bp, Homo sapiens
  misc_feature (61)..(62): /note="This region represents a CpG dinucleotide"
  misc_feature (61)..(61): /note="Nucleotide may be methylated to form 5-methylcytosine"
cagccacccttcaggaatgcagaagtccctgtaccatgtcctaagactttgtggtttccccgttatgacattttctcctaactggttgtctattttcccccttccaactcattccccctgct

SEQ ID NO: 10004 - DNA, 122 bp, Homo sapiens
  misc_feature (61)..(62): /note="This region represents a CpG dinucleotide"
  misc_feature (61)..(61): /note="Nucleotide may be methylated to form 5-methylcytosine"
tcacgatgatcaggagcaccagaattcctatccccagcagaagcttacagcgcttatccccgtcttccatgggcactctgcaatagtcatacgaagtagatgccatccagatctccccttta

SEQ ID NO: 10005 - DNA, 122 bp, Homo sapiens
  misc_feature (61)..(62): /note="This region represents a CpG dinucleotide"
  misc_feature (61)..(61): /note="Nucleotide may be methylated to form 5-methylcytosine"
gtggctgccttcttgcatctgccgttgcctcccttgtgagtaattacctatgagggaatacgcatgtttgtgtgtatgagacagagagagaatgcgcgttgggacagttggaacaatctctt

SEQ ID NO: 10006 - DNA, 122 bp, Homo sapiens
  misc_feature (61)..(62): /note="This region represents a CpG dinucleotide"
  misc_feature (61)..(61): /note="Nucleotide may be methylated to form 5-methylcytosine"
gtcatctcaccctactcaaacgcactgaatcagaatctctaggccttagaccaagacatccgtctaatgaaaggaagcacaaaaaaccatcaagagaaacaacctttaactcccaaaggaat

SEQ ID NO: 10007 - DNA, 122 bp, Homo sapiens
  misc_feature (61)..(62): /note="This region represents a CpG dinucleotide"
  misc_feature (61)..(61): /note="Nucleotide may be methylated to form 5-methylcytosine"
agtggcagagccaggtctagactcctagtgcctgactcaccgctgttctctctaccctagcgactccaagtgcatcagcataggcattgccaggagctcatgaggaatgcagactgtcaggt

SEQ ID NO: 10008 - DNA, 122 bp, Homo sapiens
  misc_feature (61)..(62): /note="This region represents a CpG dinucleotide"
  misc_feature (61)..(61): /note="Nucleotide may be methylated to form 5-methylcytosine"
gctacttccttccaaagccaacagctgtagtcctttccttggacagtgcaggtcatcattcgttgccctgagccttacccataaagaaagtccagactgcaaaacaaaagtggcagagcctg

SEQ ID NO: 10009 - DNA, 122 bp, Homo sapiens
  misc_feature (61)..(62): /note="This region represents a CpG dinucleotide"
  misc_feature (61)..(61): /note="Nucleotide may be methylated to form 5-methylcytosine"
gtgggaataacataaggtgaggaaaaattaatccaacaagaatgtatttcatgtctactacgtgcaagacaccaagaatccaggcggagtatgtcacagggcctgaccttaagagctgctgt

SEQ ID NO: 10010 - DNA, 122 bp, Homo sapiens
  misc_feature (61)..(62): /note="This region represents a CpG dinucleotide"
  misc_feature (61)..(61): /note="Nucleotide may be methylated to form 5-methylcytosine"
ttgagaacaggcgatttaacaaatagtgccagcccgagccagagaaggccaagtgccaggcgcccgcactccctgacagatgttccaagaggcctgtgggctcctgttctggctgaacaacg

SEQ ID NO: 10011 - DNA, 122 bp, Homo sapiens
  misc_feature (61)..(62): /note="This region represents a CpG dinucleotide"
  misc_feature (61)..(61): /note="Nucleotide may be methylated to form 5-methylcytosine"
cagaacagtcctgagtatctgctgaaggttcatcgctgaggatcctttctcagtctctggcgccttcctttacctccccaaagtagcccggagcctggagaacggggagatcttgattttca

SEQ ID NO: 10012 - DNA, 122 bp, Homo sapiens
  misc_feature (61)..(62): /note="This region represents a CpG dinucleotide"
  misc_feature (61)..(61): /note="Nucleotide may be methylated to form 5-methylcytosine"
ctgggcctctggaggtgattcatgaggctctgccctcaggaacaggattattacccagtccgtagtacccaatagatgatcttgctgccccacgcgaggatacagccaggaggtctacagcc

SEQ ID NO: 10013 - DNA, 122 bp, Homo sapiens
  misc_feature (61)..(62): /note="This region represents a CpG dinucleotide"
  misc_feature (61)..(61): /note="Nucleotide may be methylated to form 5-methylcytosine"
caacaacaaaaaagactcaaacagctatttgtacaccagcattcatagtagcattatgcacgatagctgaaaggtggaaacaactcacatgttcatcagtggataaatggataaacaaaatg

SEQ ID NO: 10014 - DNA, 122 bp, Homo sapiens
  misc_feature (61)..(62): /note="This region represents a CpG dinucleotide"
  misc_feature (61)..(61): /note="Nucleotide may be methylated to form 5-methylcytosine"
tgtcagaatggctgctgtcaagtccaagtgcatcatgagcattatctgcagccttatttccgctggcgtggcaatgctggccagcaaaatcctctctcaaccccatttcctccttgctccct

SEQ ID NO: 10015 - DNA, 122 bp, Homo sapiens
  misc_feature (61)..(62): /note="This region represents a CpG dinucleotide"
  misc_feature (61)..(61): /note="Nucleotide may be methylated to form 5-methylcytosine"
tcaccttaaagatgatgtcacctctttaaaaaaggcactatgtgcttagggctcctagcacgtttcccctacttacagaaaatcctacctacctacggtcaggtacaaacatgaaagaggat

SEQ ID NO: 10016 - DNA, 122 bp, Homo sapiens
  misc_feature (61)..(62): /note="This region represents a CpG dinucleotide"
  misc_feature (61)..(61): /note="Nucleotide may be methylated to form 5-methylcytosine"
tgttaataagtggttttgtctgagttgtgctgaagaaaaagatctggtgagggtggaatgcgtcatgggtaaatgaaagtgccaattgaagtgagaacacagaggtgaatggagagattgaa

SEQ ID NO: 10017 - DNA, 122 bp, Homo sapiens
  misc_feature (61)..(62): /note="This region represents a CpG dinucleotide"
  misc_feature (61)..(61): /note="Nucleotide may be methylated to form 5-methylcytosine"
acccatgtacaaggtaggaacagagctcatcacttcatccactgataagtcagagacaggcgtgtaaaatgcaattcacaggagcagttctcacccaaatgaaaccaaagtattcctcccta

SEQ ID NO: 10018 - DNA, 122 bp, Homo sapiens
  misc_feature (61)..(62): /note="This region represents a CpG dinucleotide"
  misc_feature (61)..(61): /note="Nucleotide may be methylated to form 5-methylcytosine"
ctgtttgtattctcttaccacaagttatctgctgttcctactttcacttaagctttgtatcgtactctgtgagaaatgtttgagctggctggacacatttcctgaaatcatttctctagtct

SEQ ID NO: 10019 - DNA, 122 bp, Homo sapiens
  misc_feature (61)..(62): /note="This region represents a CpG dinucleotide"
  misc_feature (61)..(61): /note="Nucleotide may be methylated to form 5-methylcytosine"
tgtaccaggcatgcccagccaaaacgtcagctggggatgttgctgtgtgagcttggcaagcgccttcacctccttgagtctcagctgccttagctggaaggtggaaataatgacctcacctg

SEQ ID NO: 10020 - DNA, 122 bp, Homo sapiens
  misc_feature (61)..(62): /note="This region represents a CpG dinucleotide"
  misc_feature (61)..(61): /note="Nucleotide may be methylated to form 5-methylcytosine"
agggaccagttctgtcctggtcactgctgtatccccagctctagataaggcctgagacatcgtaggagtgccagggatctttggttactgagaaaacgagcagctagatcaaggttcccaac

SEQ ID NO: 10021 - DNA, 122 bp, Homo sapiens
  misc_feature (61)..(62): /note="This region represents a CpG dinucleotide"
  misc_feature (61)..(61): /note="Nucleotide may be methylated to form 5-methylcytosine"
aaacctgccccagtggcctctttattcataggactggactccctgctgggtctgagagtccgtggaagcaggaaaaattctgactcatctcaatgcaagtatctgttcagagctggttcacc

SEQ ID NO: 10022 - DNA, 122 bp, Homo sapiens
  misc_feature (61)..(62): /note="This region represents a CpG dinucleotide"
  misc_feature (61)..(61): /note="Nucleotide may be methylated to form 5-methylcytosine"
ttaaaattagtgcttccaggcatgtctacttgctgtctgggacaacacagggaagcgtcccgggcacctcatgttgcaatcatgttcaaagcctgggctttggtatcaaattgcctgggttg

SEQ ID NO: 10023 - DNA, 122 bp, Homo sapiens
  misc_feature (61)..(62): /note="This region represents a CpG dinucleotide"
  misc_feature (61)..(61): /note="Nucleotide may be methylated to form 5-methylcytosine"
ttcccagggaggcagaggaacccagagcaggctgctgtccctccagcgtggctcacgcaccgcccccaggcagcgctgccccatatagcaacatcactgcctcactcaagatgctcacctca

SEQ ID NO: 10024 - DNA, 122 bp, Homo sapiens
  misc_feature (61)..(62): /note="This region represents a CpG dinucleotide"
  misc_feature (61)..(61): /note="Nucleotide may be methylated to form 5-methylcytosine"
ggctaggatagcagtgccatggagtcaacacagagtaagatgaaccagggttgctgccaacgcccagcacctgctaagtgactcagcagagaagccagtcccaggagggcagcctaaagtgt

SEQ ID NO: 10025 - DNA, 122 bp, Homo sapiens
  misc_feature (61)..(62): /note="This region represents a CpG dinucleotide"
  misc_feature (61)..(61): /note="Nucleotide may be methylated to form 5-methylcytosine"
gctgttttgcatgtattaactcatttatcctcataactactctgtgaattaggtcatactcgccctgttttacagaagagccagctgaggcctggagagagtaagtgatttcctgaagatta

SEQ ID NO: 10026 - DNA, 122 bp, Homo sapiens
  misc_feature (61)..(62): /note="This region represents a CpG dinucleotide"
  misc_feature (61)..(61): /note="Nucleotide may be methylated to form 5-methylcytosine"
gtggggagaagaggttcagaacatcaaatgctgttaaactgtggattcagtcacctcttccgtgaaacctcctctcttaccctcaggcagtaatggtctcccatttctcaaagatacaacct

SEQ ID NO: 10027 - DNA, 122 bp, Homo sapiens
  misc_feature (61)..(62): /note="This region represents a CpG dinucleotide"
  misc_feature (61)..(61): /note="Nucleotide may be methylated to form 5-methylcytosine"
ttcacaaggttttgagaggatttagtgacttgctattcacaaagtgcctagcacagcgctcgcacaccataaatgctcataaatgtgagacccactcctcccctctgaacacttaccagccc

SEQ ID NO: 10028 - DNA, 122 bp, Homo sapiens
  misc_feature (61)..(62): /note="This region represents a CpG dinucleotide"
  misc_feature (61)..(61): /note="Nucleotide may be methylated to form 5-methylcytosine"
caggaaactaaaaaaccacaacacttaaaagacaacttcctgtgggatttttggtgtctgcggctcagaatgaaaaaagcattatgtgtgcaaaatctttacacattttagatagaactact

SEQ ID NO: 10029 - DNA, 122 bp, Homo sapiens
  misc_feature (61)..(62): /note="This region represents a CpG dinucleotide"
  misc_feature (61)..(61): /note="Nucleotide may be methylated to form 5-methylcytosine"
tgttcttttgccaccacaggtattaaagcaccacatggtgacaagtgaatcacaaacacacgcgtacaggcacacccaagcacacagtgcctagaaacagctttttgttgtaaagtgtccac

SEQ ID NO: 10030 - DNA, 122 bp, Homo sapiens
  misc_feature (61)..(62): /note="This region represents a CpG dinucleotide"
  misc_feature (61)..(61): /note="Nucleotide may be methylated to form 5-methylcytosine"
ctcctccacagtgctaagctcctgcacttccatgcttattaaaagttataattctggagacgaaacagggatacactcatctggctgtaattcaggactgagaagaaagcctcaccttcacc

SEQ ID NO: 10031 - DNA, 122 bp, Homo sapiens
  misc_feature (61)..(62): /note="This region represents a CpG dinucleotide"
  misc_feature (61)..(61): /note="Nucleotide may be methylated to form 5-methylcytosine"
tagcattgtttaaatggttccagtctcagccagtgtgagtgagtgtgcccgtgtgccctgcgatagaatagatcctgcccagggcagatttccgccttgtaacctaagctacccagaactgc

SEQ ID NO: 10032 - DNA, 122 bp, Homo sapiens
  misc_feature (61)..(62): /note="This region represents a CpG dinucleotide"
  misc_feature (61)..(61): /note="Nucleotide may be methylated to form 5-methylcytosine"
agaggaacatgagtttgggttagggggcagtaatcagagtaggaagaatagataaccatacgactaacttttaagatgctgactaaagatggcagggatgtgagtcatgtgggattaactgg

SEQ ID NO: 10033 - DNA, 122 bp, Homo sapiens
  misc_feature (61)..(62): /note="This region represents a CpG dinucleotide"
  misc_feature (61)..(61): /note="Nucleotide may be methylated to form 5-methylcytosine"
aataataagagctattttactgtgtccttgccatgaccacagactttgctcagtgctttacgtacattacctgagctaatcctaacctctctttgtgaggtagattcattatccctgtttca

SEQ ID NO: 10034 - DNA, 122 bp, Homo sapiens
  misc_feature (61)..(62): /note="This region represents a CpG dinucleotide"
  misc_feature (61)..(61): /note="Nucleotide may be methylated to form 5-methylcytosine"
ggtccctcagggttgtcgcaccgtccttgccctccccccatgacatcctctgtctagacacggtcaggacacaaatctggcagctctactgtctttaggagtcccaggaacagcaatttcag

SEQ ID NO: 10035 - DNA, 122 bp, Homo sapiens
  misc_feature (61)..(62): /note="This region represents a CpG dinucleotide"
  misc_feature (61)..(61): /note="Nucleotide may be methylated to form 5-methylcytosine"
taagatcaacagcactgaatatcagtaacacgcttctggggaaattttattatttcccaacgtaagctaaggaaacagccaaggtactggtccagaactcctggaactgaagaatagcccac

SEQ ID NO: 10036 - DNA, 122 bp, Homo sapiens
  misc_feature (61)..(62): /note="This region represents a CpG dinucleotide"
  misc_feature (61)..(61): /note="Nucleotide may be methylated to form 5-methylcytosine"
cgttcagatgtttctgtggctattcacagagacggtgtgcttgttttcatgcagctccaccgcaggaggtaacccgcagacacctgcacacagcgaacggaaggctcctcctgccatattat

SEQ ID NO: 10037 - DNA, 122 bp, Homo sapiens
  misc_feature (61)..(62): /note="This region represents a CpG dinucleotide"
  misc_feature (61)..(61): /note="Nucleotide may be methylated to form 5-methylcytosine"
cttggacaagtcattgaccctgtcttcttggaaagacgtggatctcagaatccttcacaacgctttgctcctgatagctagtacctgttcagcagagtcggcacaagctcacacagcccttg

SEQ ID NO: 10038 - DNA, 122 bp, Homo sapiens
  misc_feature (61)..(62): /note="This region represents a CpG dinucleotide"
  misc_feature (61)..(61): /note="Nucleotide may be methylated to form 5-methylcytosine"
accacactggcatcctgatctggaacttccagtgtctagaactgtttgaaataggccacgcgcagcggctcatggctgtaatcccagccctttgggaggccaaggccggtgaatcatctgaa

SEQ ID NO: 10039 - DNA, 122 bp, Homo sapiens
  misc_feature (61)..(62): /note="This region represents a CpG dinucleotide"
  misc_feature (61)..(61): /note="Nucleotide may be methylated to form 5-methylcytosine"
tctattaaaaatcaattatattatttgtgagagaagttttttttttttctttttgaaatacgtaaaataaagctggctggcttcttgaattttagtagtgcattgtggaaataacacaggct

SEQ ID NO: 10040 - DNA, 122 bp, Homo sapiens
  misc_feature (61)..(62): /note="This region represents a CpG dinucleotide"
  misc_feature (61)..(61): /note="Nucleotide may be methylated to form 5-methylcytosine"
gcaaacaacccagctgctgtctctgggctgctgaacctggcagtggagctgccagagtagcgtaatctcagctgggcagcttctatgactctcacactaaatcctgttctccagctgctgct

SEQ ID NO: 10041 - DNA, 122 bp, Homo sapiens
  misc_feature (61)..(62): /note="This region represents a CpG dinucleotide"
  misc_feature (61)..(61): /note="Nucleotide may be methylated to form 5-methylcytosine"
agataagagcaaagaagaaagagtgcagggtgcagatagctgcagcaaaggtggtggaggcgggcacactgtgaacatacaaagaaagttcgcttgagccaaccaagccagaatcaactaaa

SEQ ID NO: 10042 - DNA, 122 bp, Homo sapiens
  misc_feature (61)..(62): /note="This region represents a CpG dinucleotide"
  misc_feature (61)..(61): /note="Nucleotide may be methylated to form 5-methylcytosine"
catcattaggtgacttcatcattgtgcaaccatcatagggtgcacttagacaaacctagacggtacagcctactatccacctaggctatacgttatagcctgttgctcctaggttacaaaca

SEQ ID NO: 10043 - DNA, 122 bp, Homo sapiens
  misc_feature (61)..(62): /note="This region represents a CpG dinucleotide"
  misc_feature (61)..(61): /note="Nucleotide may be methylated to form 5-methylcytosine"
aacctatataaagtggctagcatagcatctgacatatagaaaactcttaatagggccggacgtggtggcttatgcctgtaatcctagcactctgggaggccgaggcagaaggatcgcttgag

SEQ ID NO: 10044 - DNA, 122 bp, Homo sapiens
  misc_feature (61)..(62): /note="This region represents a CpG dinucleotide"
  misc_feature (61)..(61): /note="Nucleotide may be methylated to form 5-methylcytosine"
gaggctacactgtgcagtttcagggaaagacaaaaggctggattcagtctgaactcagcccgcacatgaagcagctgctcaactagctggagctccaggccagctcttgggctcccaggtca

SEQ ID NO: 10045 - DNA, 122 bp, Homo sapiens
  misc_feature (61)..(62): /note="This region represents a CpG dinucleotide"
  misc_feature (61)..(61): /note="Nucleotide may be methylated to form 5-methylcytosine"
attgtctctgagcctcatggtcaccctgcaaggtaggtattattatctttcctactttaccgatgagaagaatggggagcatgacttacctatagtcacccaaacagacaagtggctgagct

SEQ ID NO: 10046 - DNA, 122 bp, Homo sapiens
  misc_feature (61)..(62): /note="This region represents a CpG dinucleotide"
  misc_feature (61)..(61): /note="Nucleotide may be methylated to form 5-methylcytosine"
caagaggcattgcatgtttctccttgcctgcggatgctgctaacatcactatgagaaagacgcgcctgagctggcatggctaaggtatcctagccaaggctagattaaagcagagtccccag

SEQ ID NO: 10047 - DNA, 122 bp, Homo sapiens
  misc_feature (61)..(62): /note="This region represents a CpG dinucleotide"
  misc_feature (61)..(61): /note="Nucleotide may be methylated to form 5-methylcytosine"
tttgtgtccaggagtaaccatggcacagagcctgtgggcagggagtcctgcttcagagcccgcctgggtttctggggaggtaatccctgcagctggcgggtggcccgcagctggggatgttt

SEQ ID NO: 10048 - DNA, 122 bp, Homo sapiens
  misc_feature (61)..(62): /note="This region represents a CpG dinucleotide"
  misc_feature (61)..(61): /note="Nucleotide may be methylated to form 5-methylcytosine"
cacctcctggtgagcttcaatgtcttcctgctgggccaggctgccgaggcctgaagatctcgggtccaccctatgcagccagcctgaccgggttgaggaaaggctggggaggtaaagaagag

SEQ ID NO: 10049 - DNA, 122 bp, Homo sapiens
  misc_feature (61)..(62): /note="This region represents a CpG dinucleotide"
  misc_feature (61)..(61): /note="Nucleotide may be methylated to form 5-methylcytosine"
acctacatttgtatctccacttggatgtgtaatacctcaacatgactaaaactgagctaccgacctaacccctaaaacctgcatctcctgtagtcttctcagctcaagaaatggggcaacat

SEQ ID NO: 10050 - DNA, 122 bp, Homo sapiens
  misc_feature (61)..(62): /note="This region represents a CpG dinucleotide"
  misc_feature (61)..(61): /note="Nucleotide may be methylated to form 5-methylcytosine"
agaatgggagtgaatgacttgtggcaaattttggagcctgttaagcaacacatccccttgcgtaatcttggtgggaaaaccattgcagttgatctgagtctctgggtgtgtgaggcacagac

SEQ ID NO: 10051 - DNA, 122 bp, Homo sapiens
  misc_feature (61)..(62): /note="This region represents a CpG dinucleotide"
  misc_feature (61)..(61): /note="Nucleotide may be methylated to form 5-methylcytosine"
tctctaagcctctctttttggtgtttgacctgaggaacgtgcagttcacctgagctctgccgtgagagcagttacgtgcagagatctgcccatacctggctggctggtttgttcacaaagag

SEQ ID NO: 10052 - DNA, 122 bp, Homo sapiens
  misc_feature (61)..(62): /note="This region represents a CpG dinucleotide"
  misc_feature (61)..(61): /note="Nucleotide may be methylated to form 5-methylcytosine"
ggaacttgctagaaatacatgttacctgatctcaccttaaatctactgagtcagaaactccgggggtggggcccagaaatctgtgttttaaggcccttccagcaagtctgacatgcttgaaa

SEQ ID NO: 10053 - DNA, 122 bp, Homo sapiens
  misc_feature (61)..(62): /note="This region represents a CpG dinucleotide"
  misc_feature (61)..(61): /note="Nucleotide may be methylated to form 5-methylcytosine"
gtattgtttccattaaacaaaaatgccacttccttcccactctgctaagaaaactgggtacgtgttatgagaaaacacagagggggatgagcttccacaatgaagtaaatgatttcttttat

SEQ ID NO: 10054 - DNA, 122 bp, Homo sapiens
  misc_feature (61)..(62): /note="This region represents a CpG dinucleotide"
  misc_feature (61)..(61): /note="Nucleotide may be methylated to form 5-methylcytosine"
ttgtccatgtctgctcccaccagtaattttgaagtttctgttgctccatgttctgtacttcgctggtattggcctactaatgtttgccaatgcagtggggacagagcagcaccttcctgtga

SEQ ID NO: 10055 - DNA, 122 bp, Homo sapiens
  misc_feature (61)..(62): /note="This region represents a CpG dinucleotide"
  misc_feature (61)..(61): /note="Nucleotide may be methylated to form 5-methylcytosine"
aatagtgctgcctcctgcttaaagccaatgatgtcaacactgagtcaatagcaccaaggccgctgcaactgccactccctaaagcttaaggtattcaccaaaggtaccaccatcccccattg

SEQ ID NO: 10056 - DNA, 122 bp, Homo sapiens
  misc_feature (61)..(62): /note="This region represents a CpG dinucleotide"
  misc_feature (61)..(61): /note="Nucleotide may be methylated to form 5-methylcytosine"
ctccaccccagtgggtcagctggaaatgggctcaaaacttaatcacacaattacctcagccgtggcttccctgcagcctctgaggaggcagagttttttctcctttgctggtaggtttctgc

SEQ ID NO: 10057 - DNA, 122 bp, Homo sapiens
  misc_feature (61)..(62): /note="This region represents a CpG dinucleotide"
  misc_feature (61)..(61): /note="Nucleotide may be methylated to form 5-methylcytosine"
actgtgacctgctgcacaaggccgccgcccatctgggctgttggcagaaggtggacccagcgctgtgctccaacgtgctgcagcacccgtgagtcaccctaccctgctcaacccaatcccag

SEQ ID NO: 10058 - DNA, 122 bp, Homo sapiens
  misc_feature (61)..(62): /note="This region represents a CpG dinucleotide"
  misc_feature (61)..(61): /note="Nucleotide may be methylated to form 5-methylcytosine"
tgctttataaagtagtctcagacacagaggtgccttgtttaaattcacctttcccttagccgtattgtaaatacatacccatagtatagggaagggattaccactcacaggttactcatgaa

SEQ ID NO: 10059 - DNA, 122 bp, Homo sapiens
  misc_feature (61)..(62): /note="This region represents a CpG dinucleotide"
  misc_feature (61)..(61): /note="Nucleotide may be methylated to form 5-methylcytosine"
agccagtactctgtcctcaggcatgggtgttggggacgtcttgtggccataccagccaggcgtggtggaagccgcagaggtggggccaggtgagaacacccagttgtgccttgctcatcctg

SEQ ID NO: 10060 - DNA, 122 bp, Homo sapiens
  misc_feature (61)..(62): /note="This region represents a CpG dinucleotide"
  misc_feature (61)..(61): /note="Nucleotide may be methylated to form 5-methylcytosine"
aggttgttgatttactcagtcagcacttttaaaaagttttaatccatgcatcagcagcagcgggggatagcaaactatggcctgtgggtcaaacccagcctgctgcctgtttttgtatggcc

SEQ ID NO: 10061 - DNA, 122 bp, Homo sapiens
  misc_feature (61)..(62): /note="This region represents a CpG dinucleotide"
  misc_feature (61)..(61): /note="Nucleotide may be methylated to form 5-methylcytosine"
gtccccaaggatttacatagaagcactgttcttctccagtgtttgtcaatgcatccaggacgtggggattctgaaatatagctgtgactaaatgtcagcttctgactggagtgctttcagtg

SEQ ID NO: 10062 - DNA, 122 bp, Homo sapiens
  misc_feature (61)..(62): /note="This region represents a CpG dinucleotide"
  misc_feature (61)..(61): /note="Nucleotide may be methylated to form 5-methylcytosine"
tggaacagcctactatacatacacctaggctacaaacctgtactgcatgttactgaataccgtaggcaattgtaacacaatggcatttgtgcatcttaacgtaggaaaggtacagtaaaaac

SEQ ID NO: 10063 - DNA, 122 bp, Homo sapiens
  misc_feature (61)..(62): /note="This region represents a CpG dinucleotide"
  misc_feature (61)..(61): /note="Nucleotide may be methylated to form 5-methylcytosine"
ctcaagtgatccacctacctcggcctcccaaagtactgggattataggcgtgagccaccacgcctgcgcagggccccagtttttagtgttcatgctaatagctattactggttaccattgat

SEQ ID NO: 10064 - DNA, 122 bp, Homo sapiens
  misc_feature (61)..(62): /note="This region represents a CpG dinucleotide"
  misc_feature (61)..(61): /note="Nucleotide may be methylated to form 5-methylcytosine"
cacacctctttactggatattgccaaattgctcttcaaaacagttacatcaggcctggtgcggtggctcatgcctgtaatcccaggactttgaaaggtcaaggtgggcggatcacttgaggt

SEQ ID NO: 10065 - DNA, 122 bp, Homo sapiens
  misc_feature (61)..(62): /note="This region represents a CpG dinucleotide"
  misc_feature (61)..(61): /note="Nucleotide may be methylated to form 5-methylcytosine"
agccctatcccaggaaaagcagcacccctcaagtggcaaacagtgacctccacacccccacgcctgccttcctaagtcctgtccgtggagatggaggggcagacaggggccagttcctggga

SEQ ID NO: 10066 - DNA, 122 bp, Homo sapiens
  misc_feature (61)..(62): /note="This region represents a CpG dinucleotide"
  misc_feature (61)..(61): /note="Nucleotide may be methylated to form 5-methylcytosine"
aacaaacatatgctttcattcctgagttcctcatattgtttatttacttgtgtttacctacgttatccatgcacaaaagatttgagccatcttactatcatgacaacacatcctacactgta

SEQ ID NO: 10067 - DNA, 122 bp, Homo sapiens
  misc_feature (61)..(62): /note="This region represents a CpG dinucleotide"
  misc_feature (61)..(61): /note="Nucleotide may be methylated to form 5-methylcytosine"
tcagccagccagagctcacccagctgggctggttctggtggctttgagctttgtctctgtcgtggagccgcctcctggcagtgacactgagaggccaaggctgggagggaccagtgcttggt

SEQ ID NO: 10068 - DNA, 122 bp, Homo sapiens
  misc_feature (61)..(62): /note="This region represents a CpG dinucleotide"
  misc_feature (61)..(61): /note="Nucleotide may be methylated to form 5-methylcytosine"
atgcccttatttaaacttaaccacctctttcaaggccttattttcaaatgcactcatactcggaggtactagactacaacatacacattttttcttttttggtggggtggggtggggagggg

SEQ ID NO: 10069 - DNA, 122 bp, Homo sapiens
  misc_feature (61)..(62): /note="This region represents a CpG dinucleotide"
  misc_feature (61)..(61): /note="Nucleotide may be methylated to form 5-methylcytosine"
ggtgaccttggtgagccactaaacccaacctgagtcaccctcttcctgcctttctgttaccgagacaatgggtgtccaggctgttgaagcccttttgagtttagttctgcttcttgcaccca

SEQ ID NO: 10070 - DNA, 122 bp, Homo sapiens
  misc_feature (61)..(62): /note="This region represents a CpG dinucleotide"
  misc_feature (61)..(61): /note="Nucleotide may be methylated to form 5-methylcytosine"
ttaaatatctaataaaaaatatatagcaaatgcagtttgtaaactatgacaatatgaccacgcaaaagattattatcttccaagactgctggtccaaggaaaggtcagtaataaagtggaag

SEQ ID NO: 10071 - DNA, 122 bp, Homo sapiens
  misc_feature (61)..(62): /note="This region represents a CpG dinucleotide"
  misc_feature (61)..(61): /note="Nucleotide may be methylated to form 5-methylcytosine"
aaagtaagtcgggggaagcaaccaagattggccaggtgcctctgctgtgggctcctggcacgaaagggtgaagtccgtctgagtccaccgaccaatggtgacgcgcagcgccttcgcggcgc

SEQ ID NO: 10072 - DNA, 122 bp, Homo sapiens
  misc_feature (61)..(62): /note="This region represents a CpG dinucleotide"
  misc_feature (61)..(61): /note="Nucleotide may be methylated to form 5-methylcytosine"
gagagaatcagtcccggaatctgggtgtcccagctcctatgccagtgcctttttcccctacgccctgtcccagctggcagcattctgccctatgttggcagccatctgccccagacattcct

SEQ ID NO: 10073 - DNA, 122 bp, Homo sapiens
  misc_feature (61)..(62): /note="This region represents a CpG dinucleotide"
  misc_feature (61)..(61): /note="Nucleotide may be methylated to form 5-methylcytosine"
gctgagccagttggagcagagatccctgcagctgcaggtggataaccaggcactgaagtgcgtatggcccacggaggggcgggcggcgggtgcaggctggggccaagctctggcccagctct

SEQ ID NO: 10074 - DNA, 122 bp, Homo sapiens
  misc_feature (61)..(62): /note="This region represents a CpG dinucleotide"
  misc_feature (61)..(61): /note="Nucleotide may be methylated to form 5-methylcytosine"
aagttgttaatgtatgaataatactgacttacctcaaataagatgttcagattgagagtacgagatgagaagtctgagtcaacaaagtaaaatgtgatgggttatattagcaaaacaagtta

SEQ ID NO: 10075 - DNA, 122 bp, Homo sapiens
  misc_feature (61)..(62): /note="This region represents a CpG dinucleotide"
  misc_feature (61)..(61): /note="Nucleotide may be methylated to form 5-methylcytosine"
agaaagagggagccaaactcatccttttatcaggaagttgctctgctgtgataactaacccgctcagcattaatggcattaatccattcatgagagcacagccctcatgacctaatcacctc

SEQ ID NO: 10076 - DNA, 122 bp, Homo sapiens
  misc_feature (61)..(62): /note="This region represents a CpG dinucleotide"
  misc_feature (61)..(61): /note="Nucleotide may be methylated to form 5-methylcytosine"
gggttcagctgacccaggccctacccagctttgctccctatagccactttggtagcagaacgtgagatgggatccctgaaagccccatgccctgcccattaccagggacacataccccgtta

SEQ ID NO: 10077 - DNA, 122 bp, Homo sapiens
  misc_feature (61)..(62): /note="This region represents a CpG dinucleotide"
  misc_feature (61)..(61): /note="Nucleotide may be methylated to form 5-methylcytosine"
gtgactcagtccctcacatgctgtgctacacttagcttggatctctaacgatattttcttcgtcttcaggatccttctccgccttcataacgctcgaatattatcttccttgcaatgcagaa

SEQ ID NO: 10078 - DNA, 122 bp, Homo sapiens
  misc_feature (61)..(62): /note="This region represents a CpG dinucleotide"
  misc_feature (61)..(61): /note="Nucleotide may be methylated to form 5-methylcytosine"
gaaattaagtgtactggccaagatcatgtggccaacaggtgttcaaatcttggactaacacgtcccaggcctaagctctttaatactttaaaatgaaagcttaggctgggcgcggtgactca

SEQ ID NO: 10079 - DNA, 122 bp, Homo sapiens
  misc_feature (61)..(62): /note="This region represents a CpG dinucleotide"
  misc_feature (61)..(61): /note="Nucleotide may be methylated to form 5-methylcytosine"
attccaacaatgctcactcccactcctgttgcataattcaggtgtgcctctgggaaaagccgttcggatcattgtctttacccacataatccttggtggtgaaggtgtggcctaaggttaat

SEQ ID NO: 10080 - DNA, 122 bp, Homo sapiens
  misc_feature (61)..(62): /note="This region represents a CpG dinucleotide"
  misc_feature (61)..(61): /note="Nucleotide may be methylated to form 5-methylcytosine"
tagtagctaagtcaatggagagtgagatgatttttacctacgttagaaggggaacaagaacgtttgagaaaaggaaacaatatgtgtatgttctgtgcaataggctgaatactagaaaagga

SEQ ID NO: 10081 - DNA, 122 bp, Homo sapiens
  misc_feature (61)..(62): /note="This region represents a CpG dinucleotide"
  misc_feature (61)..(61): /note="Nucleotide may be methylated to form 5-methylcytosine"
tgttcaccaagtgtttatgaatcatccaagaaggtcaggataggtttttgttttgctttacgggagacatcctgaatctgaaaggcagaagacacctatctggcaggtccagggttagcaca

SEQ ID NO: 10082 - DNA, 122 bp, Homo sapiens
  misc_feature (61)..(62): /note="This region represents a CpG dinucleotide"
  misc_feature (61)..(61): /note="Nucleotide may be methylated to form 5-methylcytosine"
gctcagacacgtcctcttttccccacccggattttcagttcccctgaggaaccacctctccgtctccgagtgcccagtctggttcactgagccatttgtgcccagaaggacctgtagtgctg

SEQ ID NO: 10083 - DNA, 122 bp, Homo sapiens
  misc_feature (61)..(62): /note="This region represents a CpG dinucleotide"
  misc_feature (61)..(61): /note="Nucleotide may be methylated to form 5-methylcytosine"
ctctaacttttcagaggctttataatgggagggaaacttagaggcataagcctcactttacgagtgaaaaacaggagacaaagctaaaatttttgcagagtcatgcgagtggttagggacag

SEQ ID NO: 10084 - DNA, 122 bp, Homo sapiens
  misc_feature (61)..(62): /note="This region represents a CpG dinucleotide"
  misc_feature (61)..(61): /note="Nucleotide may be methylated to form 5-methylcytosine"
cccctgacccaaaccccattcagggcattccaatccagctcatgattttcagccacacggcgaggggatgaagccatttcaggttatgcacttgatcccaaagagttttttgtgcttcgctc

SEQ ID NO: 10085 - DNA, 122 bp, Homo sapiens
  misc_feature (61)..(62): /note="This region represents a CpG dinucleotide"
  misc_feature (61)..(61): /note="Nucleotide may be methylated to form 5-methylcytosine"
atttctaaatgactcaaaaacaactctcagaaacttaggaggccaataagcactgaaacacgttctttccatcagcagagagggcttagaggactctccaaacaacatcctctctcacccta

SEQ ID NO: 10086 - DNA, 122 bp, Homo sapiens
  misc_feature (61)..(62): /note="This region represents a CpG dinucleotide"
  misc_feature (61)..(61): /note="Nucleotide may be methylated to form 5-methylcytosine"
ttgcaaaacctctctaagctcatttcttcatccacaaaatggtaaaactaatcttttctgcgtagggttgttgtaagaattacatgagaggtgtgaaaacagtctagaacagtggcagtgtg

SEQ ID NO: 10087 - DNA, 122 bp, Homo sapiens
  misc_feature (61)..(62): /note="This region represents a CpG dinucleotide"
  misc_feature (61)..(61): /note="Nucleotide may be methylated to form 5-methylcytosine"
gtgtcggctgagaccaaggtggccgactggctggtgcagaatgacccgagcctgctgcaccgggttggccctggggatgaccgccacagcaccaagagcgacctgcctgtccacacccgcac

SEQ ID NO: 10088 - DNA, 122 bp, Homo sapiens
  misc_feature (61)..(62): /note="This region represents a CpG dinucleotide"
  misc_feature (61)..(61): /note="Nucleotide may be methylated to form 5-methylcytosine"
gtggaagagctgtattatgctcaggaaaaacagcaagggatcccagggagttgctgtgggcgggagactgaagattgaagtaaagtaagcctgagggttaaggaaagatatgtggcaggaaa

SEQ ID NO: 10089 - DNA, 122 bp, Homo sapiens
  misc_feature (61)..(62): /note="This region represents a CpG dinucleotide"
  misc_feature (61)..(61): /note="Nucleotide may be methylated to form 5-methylcytosine"
attgctagtatgtcctcaggtgatgctgatgctgttggccagagacctccctttgagaaccgtggagctaagctctcattgcacagcatggttttaaatgcaggaacttagtgtgtaaaatg

SEQ ID NO: 10090 - DNA, 122 bp, Homo sapiens
  misc_feature (61)..(62): /note="This region represents a CpG dinucleotide"
  misc_feature (61)..(61): /note="Nucleotide may be methylated to form 5-methylcytosine"
gccacttggagctttctgagcctcagtgtgctcatgattaaaatggggtaatactatctgcgttatgaggattcttgtgaaatttaggtattgtctagaaaatcccagtgcagggcccagta

SEQ ID NO: 10091 - DNA, 122 bp, Homo sapiens
  misc_feature (61)..(62): /note="This region represents a CpG dinucleotide"
  misc_feature (61)..(61): /note="Nucleotide may be methylated to form 5-methylcytosine"
ggacaaatggcaaggagtgtgtttggggcaggggaggtggcacgtctgtgcctggcactgcgagttctggcaggtgacagcaaataggatagaaagatatgaatgtctaggatatgtaagaa

SEQ ID NO: 10092 - DNA, 122 bp, Homo sapiens
  misc_feature (61)..(62): /note="This region represents a CpG dinucleotide"
  misc_feature (61)..(61): /note="Nucleotide may be methylated to form 5-methylcytosine"
aatacagagctgggcttggtcactggtgcttccgactgcagtaacacagcagctctcagacgtgagccgtagatctcagacctttccagaagcttggagttcttgcttcgtagtgggccccg

SEQ ID NO: 10093 - DNA, 122 bp, Homo sapiens
  misc_feature (61)..(62): /note="This region represents a CpG dinucleotide"
  misc_feature (61)..(61): /note="Nucleotide may be methylated to form 5-methylcytosine"
agaaatgtccaggtaatgtgtatactcactcacttccctcatgacaggcttagccttaggcgtgaagttggaacagaggcatttctcttgcattttgtgtagtgttccgtgtgcctctttgt

SEQ ID NO: 10094 - DNA, 122 bp, Homo sapiens
  misc_feature (61)..(62): /note="This region represents a CpG dinucleotide"
  misc_feature (61)..(61): /note="Nucleotide may be methylated to form 5-methylcytosine"
ctaagaactctgccttctatagaatttagtaactagtcaggttcttccacttacccgtatcgtgtaccaagagataagtatttgaccattacgtggtaaaaagtaacatgaatatggtgaaa

SEQ ID NO: 10095 - DNA, 122 bp, Homo sapiens
  misc_feature (61)..(62): /note="This region represents a CpG dinucleotide"
  misc_feature (61)..(61): /note="Nucleotide may be methylated to form 5-methylcytosine"
acaggtgagcaggtccgggtgagcaggttcaacaggagggaaccccaggatgggatgcatcgccacagaccaaatatctggagggtgtcccggagaacctgtgcttttttggaattcccttg

SEQ ID NO: 10096 - DNA, 122 bp, Homo sapiens
  misc_feature (61)..(62): /note="This region represents a CpG dinucleotide"
  misc_feature (61)..(61): /note="Nucleotide may be methylated to form 5-methylcytosine"
agtcactccctgattaagtttgcgatagtccacagtcattctctgagatcctttgacttccgtgcaggccaaacagatgagtcaaatggggttgtgatagactactgtccttacttctttca

SEQ ID NO: 10097 - DNA, 122 bp, Homo sapiens
  misc_feature (61)..(62): /note="This region represents a CpG dinucleotide"
  misc_feature (61)..(61): /note="Nucleotide may be methylated to form 5-methylcytosine"
gcttgtcatcttaactgtgactgggccaggttcccagcacacccatgccagtgtatcccacgctccacccaggcatgacactttggtgtcagaccagggcccatggcagagggcagggcaca

SEQ ID NO: 10098 - DNA, 122 bp, Homo sapiens
  misc_feature (61)..(62): /note="This region represents a CpG dinucleotide"
  misc_feature (61)..(61): /note="Nucleotide may be methylated to form 5-methylcytosine"
acctcagtttaactccttctcactttaaaaaaaagtgttggtacagccattatgtcaggacgtgcagctgtcgtatgtctactgataattttgaatgaatgactgagctagctatgttcagt

SEQ ID NO: 10099 - DNA, 122 bp, Homo sapiens
  misc_feature (61)..(62): /note="This region represents a CpG dinucleotide"
  misc_feature (61)..(61): /note="Nucleotide may be methylated to form 5-methylcytosine"
cctctgacagttccataataacctgtgtacactttctggcacccttgcttctccaggtcacgccttccaatggaaggggaagcagtgacaaaggtgaaaatcatggcggtaacagaagtcat

SEQ ID NO: 10100 - DNA, 122 bp, Homo sapiens
  misc_feature (61)..(62): /note="This region represents a CpG dinucleotide"
  misc_feature (61)..(61): /note="Nucleotide may be methylated to form 5-methylcytosine"
gtctctctggaatcagatggaataaatatagacaaataaatataaatatacaccagctcacgcacagagacatcaaatggagtgccgggtttacaaattgctgactgtgttcataaacaaac

SEQ ID NO: 10101 - DNA, 122 bp, Homo sapiens
  misc_feature (61)..(62): /note="This region represents a CpG dinucleotide"
  misc_feature (61)..(61): /note="Nucleotide may be methylated to form 5-methylcytosine"
ttcattttaaaacatttttattatcctctaaaagcaatcctgcttcccttggctcttactcgtatcttacccaaccttcagcaactgctagtctactttctatcacttagagatttgcctct

SEQ ID NO: 10102 - DNA, 122 bp, Homo sapiens
  misc_feature (61)..(62): /note="This region represents a CpG dinucleotide"
  misc_feature (61)..(61): /note="Nucleotide may be methylated to form 5-methylcytosine"
ctcatgacctgttactatggttgtgaaacttttagaggagatccattcccgactggaaaacgtgaattgctgaggatgattctaagcaaaggaagtacgttaattatatagacagaacagag

SEQ ID NO: 10103 - DNA, 122 bp, Homo sapiens
  misc_feature (61)..(62): /note="This region represents a CpG dinucleotide"
  misc_feature (61)..(61): /note="Nucleotide may be methylated to form 5-methylcytosine"
aagttccccttaaaagcctacagacagaaattcataaatcaacgagaccagctgtcaagacgtgtcacactactgtctctgctgccactgttaatcacagcataaaggcatgaagatgccac

SEQ ID NO: 10104 - DNA, 122 bp, Homo sapiens
  misc_feature (61)..(62): /note="This region represents a CpG dinucleotide"
  misc_feature (61)..(61): /note="Nucleotide may be methylated to form 5-methylcytosine"
ggcatgttgttaggaaagagagaggcaaggcaaataaaattactgctaacgctcagagatcggcaggagtcctacttgcctaatcttaccggtgggagcaagcggctgttgtaatccaatta

SEQ ID NO: 10105 - DNA, 122 bp, Homo sapiens
  misc_feature (61)..(62): /note="This region represents a CpG dinucleotide"
  misc_feature (61)..(61): /note="Nucleotide may be methylated to form 5-methylcytosine"
acctagtcatccatgctacatgattacaaaacatctgcaaaacatgcatcacacaatctgcgcacaacagttaaacaatactagaattaaatgttttaagggcataagaagccaaatacctg

SEQ ID NO: 10106 - DNA, 122 bp, Homo sapiens
  misc_feature (61)..(62): /note="This region represents a CpG dinucleotide"
  misc_feature (61)..(61): /note="Nucleotide may be methylated to form 5-methylcytosine"
gcttccttcctggctgggaggtggggcatgctgggtaatcagagagaatgcttctagagacgaggccaagctggtcttaaacaactgaggccttgtggaaggagtgaatgtgatggtgatcc

SEQ ID NO: 10107 - DNA, 122 bp, Homo sapiens
  misc_feature (61)..(62): /note="This region represents a CpG dinucleotide"
  misc_feature (61)..(61): /note="Nucleotide may be methylated to form 5-methylcytosine"
gagccaccgtgctcagccgcaaaattctttatgaattttacacttggcaaatgttaatgacggaagccatagtctgctcctaatacatgtccaaagcattgactgttgtgtcattagctgcc

SEQ ID NO: 10108 - DNA, 122 bp, Homo sapiens
  misc_feature (61)..(62): /note="This region represents a CpG dinucleotide"
  misc_feature (61)..(61): /note="Nucleotide may be methylated to form 5-methylcytosine"
gcgaagaggaacactcagcttgggaaaggaaacaacccacgtttgcaatgcgtcatcctgcgccagattgagcacctcaaggtttgtctgcacacagttggtttgtactccaagatttcttc

SEQ ID NO: 10109 - DNA, 122 bp, Homo sapiens
  misc_feature (61)..(62): /note="This region represents a CpG dinucleotide"
  misc_feature (61)..(61): /note="Nucleotide may be methylated to form 5-methylcytosine"
gcttccaaatatttgagacagatttatggacactgagtcacaaatggctgccatatacttcgccttttgagctagtctggtggcagaacacctctctcctgatattcaaggacctgtctcca

SEQ ID NO: 10110 - DNA, 122 bp, Homo sapiens
  misc_feature (61)..(62): /note="This region represents a CpG dinucleotide"
  misc_feature (61)..(61): /note="Nucleotide may be methylated to form 5-methylcytosine"
gctgtccctctcccagtcgctgtaggcacagggatgagccagcaaatgagacgatgtcatcgccctggccacatgactggtctaataaagagaacatgactcacaggagcctctcagtgtta

SEQ ID NO: 10111 - DNA, 122 bp, Homo sapiens
  misc_feature (61)..(62): /note="This region represents a CpG dinucleotide"
  misc_feature (61)..(61): /note="Nucleotide may be methylated to form 5-methylcytosine"
tcccgtgttgtaatctccaaattgctgagtgtgggagaaccaaaaggctcccatctaacacggtgacaaggctaagacagcaagagtcagtgtttatttgtttggcatttagcaattatttt

SEQ ID NO: 10112 - DNA, 122 bp, Homo sapiens
  misc_feature (61)..(62): /note="This region represents a CpG dinucleotide"
  misc_feature (61)..(61): /note="Nucleotide may be methylated to form 5-methylcytosine"
gaatcccaggactctgtgttttctggttacgctcggcctctctggcttcttcacagctgccgctccctcattctcatcttaactgtggccacacccaaaggaaggatttgtaattctcttct

SEQ ID NO: 10113 - DNA, 122 bp, Homo sapiens
  misc_feature (61)..(62): /note="This region represents a CpG dinucleotide"
  misc_feature (61)..(61): /note="Nucleotide may be methylated to form 5-methylcytosine"
gcttatactgaaagagaaatgatttttatatagctcacaggattctgtgagaaattgtatcggtgaaaacaaatgacctagtttcttcgaccaaaaaaactacaagggagaaacaaggaagg

SEQ ID NO: 10114 - DNA, 122 bp, Homo sapiens
  misc_feature (61)..(62): /note="This region represents a CpG dinucleotide"
  misc_feature (61)..(61): /note="Nucleotide may be methylated to form 5-methylcytosine"
gtgatgagagatagattgggaattaatagcaaatcaggaaagaagcaattaagtaaatgacgagaattgaggctggttagagtaggtctgagaagcagagtagatacttttctcattttaat

SEQ ID NO: 10115 - DNA, 122 bp, Homo sapiens
  misc_feature (61)..(62): /note="This region represents a CpG dinucleotide"
  misc_feature (61)..(61): /note="Nucleotide may be methylated to form 5-methylcytosine"
ttgaagggggtggaagatcatcagggagagagtaggttttcctatttgagaagtgaaaggcggtatagacggctgtcctccatgccttggattgtaggtggcatttactgctcaaggagaag

SEQ ID NO: 10116 - DNA, 122 bp, Homo sapiens
  misc_feature (61)..(62): /note="This region represents a CpG dinucleotide"
  misc_feature (61)..(61): /note="Nucleotide may be methylated to form 5-methylcytosine"
gggtgagtgacagcacaccaatctcctggcacagtaataacaagtaaatgagatcattcacgtcaagggcgttttataaattagaagagactaacaaaggtgcacttgtgtccgggcgcggt

SEQ ID NO: 10117 - DNA, 122 bp, Homo sapiens
  misc_feature (61)..(62): /note="This region represents a CpG dinucleotide"
  misc_feature (61)..(61): /note="Nucleotide may be methylated to form 5-methylcytosine"
tcggtgaatcatatgttctgggcctgacctggatccccagtcctgacacccagcccagcacgggagctcagtgaatgaatgaatgaatgaaatgaatgaatgaaatgaatgaatgaatgaat

SEQ ID NO: 10118 - DNA, 122 bp, Homo sapiens
  misc_feature (61)..(62): /note="This region represents a CpG dinucleotide"
  misc_feature (61)..(61): /note="Nucleotide may be methylated to form 5-methylcytosine"
gcatttgtccccacttagtaaataaatggctatctgttgctcagccaaaaaccctggagtcgcacttgccttctctcatttaccaacacctgacagttgatccatcagagagtcctgctggc

SEQ ID NO: 10119 - DNA, 122 bp, Homo sapiens
  misc_feature (61)..(62): /note="This region represents a CpG dinucleotide"
  misc_feature (61)..(61): /note="Nucleotide may be methylated to form 5-methylcytosine"
agtgtttgcccttaagccagaatgctattttgaaaagctggctaattttaatccaaattgcgtatcttgggctaagagctctccatgcctgagaggaagaacaatgcacaaaagtggactcc

SEQ ID NO: 10120 - DNA, 122 bp, Homo sapiens
  misc_feature (61)..(62): /note="This region represents a CpG dinucleotide"
  misc_feature (61)..(61): /note="Nucleotide may be methylated to form 5-methylcytosine"
acatataacatcttgacctaaagcagccttcattgtccctgaaacttgtcgagtgatttccgcaacagcccagcctgcctaaccccaaattctttcaacaaattcattcttcccttccatga

SEQ ID NO: 10121 - DNA, 122 bp, Homo sapiens
  misc_feature (61)..(62): /note="This region represents a CpG dinucleotide"
  misc_feature (61)..(61): /note="Nucleotide may be methylated to form 5-methylcytosine"
attactcaggacatcctggcaaacacctttcaagcaagtcaccacaagggcctgtatagacggtagtgatgatgagaggagccaactttagcaccaatgctatttagcagtagaagggtaga

SEQ ID NO: 10122 - DNA, 122 bp, Homo sapiens
  misc_feature (61)..(62): /note="This region represents a CpG dinucleotide"
  misc_feature (61)..(61): /note="Nucleotide may be methylated to form 5-methylcytosine"
aactagttgttagtcacttttaatgattcagttgtcaggcagttttgggttgtgcatttgcgagttgccaccagaatgactaagtgtgataatttaatgactcctgactgacctccactgcc

SEQ ID NO: 10123 - DNA, 122 bp, Homo sapiens
  misc_feature (61)..(62): /note="This region represents a CpG dinucleotide"
  misc_feature (61)..(61): /note="Nucleotide may be methylated to form 5-methylcytosine"
gcccattattctaggtcctaatctgtttggtggagttgttactccacttctctgaccttgcgcgtagggcctgggcactcctaggaattaggggcagggtggggttagggctgaaacccatt

SEQ ID NO: 10124 - DNA, 122 bp, Homo sapiens
  misc_feature (61)..(62): /note="This region represents a CpG dinucleotide"
  misc_feature (61)..(61): /note="Nucleotide may be methylated to form 5-methylcytosine"
caggcgccgcaggttcccgagctcctgcaggtgggcagagagtcagagcgcggatgggcacgaagcagggggccagccccaccctgactcaccgggggcagtgctgacagctggttccggtc

SEQ ID NO: 10125 - DNA, 122 bp, Homo sapiens
  misc_feature (61)..(62): /note="This region represents a CpG dinucleotide"
  misc_feature (61)..(61): /note="Nucleotide may be methylated to form 5-methylcytosine"
agcaagtgcaacgggcaagagcaagcttaggagtaaacccacggaccgtcgggggtggctcggcgtgctctgcaggtgagctggtgaagaagtgtttgtcacggcctgtgcacagctgtaca

SEQ ID NO: 10126 - DNA, 122 bp, Homo sapiens
  misc_feature (61)..(62): /note="This region represents a CpG dinucleotide"
  misc_feature (61)..(61): /note="Nucleotide may be methylated to form 5-methylcytosine"
aagacaggagttaacccaagaatgacaaacttccttgacttggcgatttagaaaaaattacggcccagtttggtcagctaagaggcacacccaagaaacagctttgaagtatgtaggggtaa

SEQ ID NO: 10127 - DNA, 122 bp, Homo sapiens
  misc_feature (61)..(62): /note="This region represents a CpG dinucleotide"
  misc_feature (61)..(61): /note="Nucleotide may be methylated to form 5-methylcytosine"
attgtgggcgtggcagtcggaggtgccaagcccggggaggcggggcttcctgggagcatgcgtagtgccggctctgcctgggcggggtcctaggctgctgctcccgcctcccccggcacagg

SEQ ID NO: 10128 - DNA, 122 bp, Homo sapiens
  misc_feature (61)..(62): /note="This region represents a CpG dinucleotide"
  misc_feature (61)..(61): /note="Nucleotide may be methylated to form 5-methylcytosine"
atctgagcaccagaaatcctgctctaactctttagctgtgtgacctttggcaagtttcttcgtctgtaaaatgggaccaatggggttgtagagaggattaaatgaggtaatatgtgtaacgt

SEQ ID NO: 10129 - DNA, 122 bp, Homo sapiens
  misc_feature (61)..(62): /note="This region represents a CpG dinucleotide"
  misc_feature (61)..(61): /note="Nucleotide may be methylated to form 5-methylcytosine"
atccagcccctttctgggccatgactatggtgttgactcaaccaaagcctcagttgagttcgtctgagctcaacagggttcacaaatgattggaatcattttctttagcataagtgggtagg

SEQ ID NO: 10130 - DNA, 122 bp, Homo sapiens
  misc_feature (61)..(62): /note="This region represents a CpG dinucleotide"
  misc_feature (61)..(61): /note="Nucleotide may be methylated to form 5-methylcytosine"
tccgcccagcactgtggcagcctgtctgctttgcaggtgcacttgggactctgtcaaaaccgctaagaggagaggactgaggctgggccgggaaggaggccctagcctctctgttcctgggc

SEQ ID NO: 10131 - DNA, 122 bp, Homo sapiens
  misc_feature (61)..(62): /note="This region represents a CpG dinucleotide"
  misc_feature (61)..(61): /note="Nucleotide may be methylated to form 5-methylcytosine"
gacagcttttcttgatatgccagaaggtccttaaagtccttatttccataaataccgtcacgatacccctgctcccatcacccagatgaaccgctgttctttgtagtgaaatggtcttaaca

SEQ ID NO: 10132 - DNA, 122 bp, Homo sapiens
  misc_feature (61)..(62): /note="This region represents a CpG dinucleotide"
  misc_feature (61)..(61): /note="Nucleotide may be methylated to form 5-methylcytosine"
tgactgaatgaagtcgatgcaatcatgtctttgcatatgggagttcctcttcctggaatgcgactcaccccccttcagatccttcctgtccttcaggcccagtactgttccccagcttctcc

SEQ ID NO: 10133 - DNA, 122 bp, Homo sapiens
  misc_feature (61)..(62): /note="This region represents a CpG dinucleotide"
  misc_feature (61)..(61): /note="Nucleotide may be methylated to form 5-methylcytosine"
aggagggccttgtgtgtctgccaagggttggctcaccatcctgcaggccaaggcagctttcgggtgaagagtgcttcggtcacctttaacatgggtgttttgggctgcacggtgggctggaa

SEQ ID NO: 10134 - DNA, 122 bp, Homo sapiens
  misc_feature (61)..(62): /note="This region represents a CpG dinucleotide"
  misc_feature (61)..(61): /note="Nucleotide may be methylated to form 5-methylcytosine"
ccacccgcctcagcctcccaaagtgctaggattaaaggcgtgagccactgcacccagccacgatttttgttgagattaggaaacaaaaccaagtcagaaggagccaaattaggactgtaagg

SEQ ID NO: 10135 - DNA, 122 bp, Homo sapiens
  misc_feature (61)..(62): /note="This region represents a CpG dinucleotide"
  misc_feature (61)..(61): /note="Nucleotide may be methylated to form 5-methylcytosine"
tttccatcattcagccttattaaaatacaccccttttaagccagaatcttttgagaatggcgtttgtgtgtggaccagccctacatttgataatctacctgtcattctggtagatatttaca

SEQ ID NO: 10136 - DNA, 122 bp, Homo sapiens
  misc_feature (61)..(62): /note="This region represents a CpG dinucleotide"
  misc_feature (61)..(61): /note="Nucleotide may be methylated to form 5-methylcytosine"
ctttacatgataaagaagtgaatgggcagagaaatgcacaaaacccaggcagcaccaatacgcaggagacataatgtatgagtcatctcaaagctagatgattgagagttggtttatggatc

SEQ ID NO: 10137 - DNA, 122 bp, Homo sapiens
  misc_feature (61)..(62): /note="This region represents a CpG dinucleotide"
  misc_feature (61)..(61): /note="Nucleotide may be methylated to form 5-methylcytosine"
tccaggcacgtcctgacacactcggctcttaccttccgcttcatactcctcactgcgttgcgtcttccagtgctagagaaggcaagagaagattagtgtgctttagaacttattcagaaaga

SEQ ID NO: 10138 - DNA, 122 bp, Homo sapiens
  misc_feature (61)..(62): /note="This region represents a CpG dinucleotide"
  misc_feature (61)..(61): /note="Nucleotide may be methylated to form 5-methylcytosine"
tctctcctgctgttttttctatagaaagagaaatatgaaatactttcccagccaccattgcgctaggtgtgaccttatgacacagttctgactaataagacataagaggcctgggcacggtg

SEQ ID NO: 10139 - DNA, 122 bp, Homo sapiens
  misc_feature (61)..(62): /note="This region represents a CpG dinucleotide"
  misc_feature (61)..(61): /note="Nucleotide may be methylated to form 5-methylcytosine"
ctgtcttaggttgtgtgattagggaaggcctctccaggaggtgaatgtcctcattcataccgtaaacaatgagcttgtgatgattaggaacaggttgttccaggaagaaggaacagcaagtg

SEQ ID NO: 10140 - DNA, 122 bp, Homo sapiens
  misc_feature (61)..(62): /note="This region represents a CpG dinucleotide"
  misc_feature (61)..(61): /note="Nucleotide may be methylated to form 5-methylcytosine"
aaataaataagaatcttatgggaccaccctggcatatgtggttcatctttgaccaaaacacgccattatgaagcatgtgattatattacatggtttagactctgggtgtggttagattccct

SEQ ID NO: 10141 - DNA, 122 bp, Homo sapiens
  misc_feature (61)..(62): /note="This region represents a CpG dinucleotide"
  misc_feature (61)..(61): /note="Nucleotide may be methylated to form 5-methylcytosine"
ttccccaaggtgaattaccttcatcaggcttgcagtgcagttatttctcatttcccatcacgtaatatgttcttagggactcttcactgtgctgcaagaaaataagctgttgagatttaatg

SEQ ID NO: 10142 - DNA, 122 bp, Homo sapiens
  misc_feature (61)..(62): /note="This region represents a CpG dinucleotide"
  misc_feature (61)..(61): /note="Nucleotide may be methylated to form 5-methylcytosine"
tgattaattcatctcactggaaatctggttgcagaaactccctgatgtcacagacacaaacgtaaaaaccaatcaataatttaaatttttacctttcgacaagctcttttgatggcactgac

SEQ ID NO: 10143 - DNA, 122 bp, Homo sapiens
  misc_feature (61)..(62): /note="This region represents a CpG dinucleotide"
  misc_feature (61)..(61): /note="Nucleotide may be methylated to form 5-methylcytosine"
gaaaccccatgtctactaaaactacaaaatgtagctgggcaggccgggccggtggcttgacgcctgtaatcccagcactttgggaggccgagcgggtggatcacgaggttaggagattgaga

SEQ ID NO: 10144 - DNA, 122 bp, Homo sapiens
  misc_feature (61)..(62): /note="This region represents a CpG dinucleotide"
  misc_feature (61)..(61): /note="Nucleotide may be methylated to form 5-methylcytosine"
ggtaacctattagacctgagagggcatcattaactgtgccccaaactaaaacatactaaacgaacaaaccccaaacaaatatcagtatctgtcagaggcagtggcaatgaccactatgctag

SEQ ID NO: 10145 - DNA, 122 bp, Homo sapiens
  misc_feature (61)..(62): /note="This region represents a CpG dinucleotide"
  misc_feature (61)..(61): /note="Nucleotide may be methylated to form 5-methylcytosine"
gtttcctgtccgggctggcggggccgccagtcggcgtggggtgcggcaaggggagcggggcgctgggtcagccgagggccgggcctcgggggcgcagccggactggacggcggctcctgtgg

SEQ ID NO: 10146 - DNA, 122 bp, Homo sapiens
  misc_feature (61)..(62): /note="This region represents a CpG dinucleotide"
  misc_feature (61)..(61): /note="Nucleotide may be methylated to form 5-methylcytosine"
gccagcctcttagtgtcatggatctcctgccctcctcagaatattcaaaagaacattacacggccaggcgctgtggctcatgcctgtaatcccagcactttgggaggccgaggcgggtggat

SEQ ID NO: 10147 - DNA, 122 bp, Homo sapiens
  misc_feature (61)..(62): /note="This region represents a CpG dinucleotide"
  misc_feature (61)..(61): /note="Nucleotide may be methylated to form 5-methylcytosine"
attttcaagaatgtggtaaagatttggatctctaatccaaacatgatcctttctactacacgtgccagagcacccatggaaaataaaactgggatcacaaaagggaaagtgcaaaagcctgg

SEQ ID NO: 10148 - DNA, 122 bp, Homo sapiens
  misc_feature (61)..(62): /note="This region represents a CpG dinucleotide"
  misc_feature (61)..(61): /note="Nucleotide may be methylated to form 5-methylcytosine"
gaagtggacagaggaatgatccgggccagcctgggcattctcatggcctacaggacagagcgcttctctgaggctggaagggttactgcagccttcacttggcacccacagccctgagacat

SEQ ID NO: 10149 - DNA, 122 bp, Homo sapiens
  misc_feature (61)..(62): /note="This region represents a CpG dinucleotide"
  misc_feature (61)..(61): /note="Nucleotide may be methylated to form 5-methylcytosine"
ttgtaggagcctgaaacttctacattagcagttgagtctatgaaacatgaattacaactgcgtcttaacaccagacatgtgtataaactgggaagataggttaattctggtgcttacagtca

SEQ ID NO: 10150 - DNA, 122 bp, Homo sapiens
  misc_feature (61)..(62): /note="This region represents a CpG dinucleotide"
  misc_feature (61)..(61): /note="Nucleotide may be methylated to form 5-methylcytosine"
ttacagagtatctgctttccacggcatctacaaaacaaaggatgacatggcagtgagcaacgcaaataacccagttcaactgccccaacaacatcacagggtcaggagcaggtcgagaaaag

SEQ ID NO: 10151 - DNA, 122 bp, Homo sapiens
  misc_feature (61)..(62): /note="This region represents a CpG dinucleotide"
  misc_feature (61)..(61): /note="Nucleotide may be methylated to form 5-methylcytosine"
aagcaggtaaacaaatctgtgttttagaaaaatcacattggctacactccaggaagcagtcgaacaacagcgaaagcttttgggaaactgtaatcccatagaaagacaaaggattataagta

SEQ ID NO: 10152 - DNA, 122 bp, Homo sapiens
  misc_feature (61)..(62): /note="This region represents a CpG dinucleotide"
  misc_feature (61)..(61): /note="Nucleotide may be methylated to form 5-methylcytosine"
tcctggggtgcagcaggtttattttggataaagcagtggtgtgcagagaccaacctcccacggcaggctggagggatgtgcagggggaccacccagaaaggaggcgaggggtggaagacaga

SEQ ID NO: 10153 - DNA, 122 bp, Homo sapiens
  misc_feature (61)..(62): /note="This region represents a CpG dinucleotide"
  misc_feature (61)..(61): /note="Nucleotide may be methylated to form 5-methylcytosine"
aacttggcccatgcctgctctgaagctttgacagctgcaggctggattaactgatccattcgtcaaactggttgtcagagccagcatgttttagttatccttcagtttctaacagaaaaatc

SEQ ID NO: 10154 - DNA, 122 bp, Homo sapiens
  misc_feature (61)..(62): /note="This region represents a CpG dinucleotide"
  misc_feature (61)..(61): /note="Nucleotide may be methylated to form 5-methylcytosine"
ctaagatgaaaacacctgtgaaccgtggctacataataaaatgtaagtgtttacaaaccacgacaacatacacataatcaaaattcgggacaggaaacaggaaatggagagggagtgcctca

SEQ ID NO: 10155 - DNA, 122 bp, Homo sapiens
  misc_feature (61)..(62): /note="This region represents a CpG dinucleotide"
  misc_feature (61)..(61): /note="Nucleotide may be methylated to form 5-methylcytosine"
ccgctgcctcttctctgcaggtacacttgctgaaggaccagttggctgctgaggctgcggcgcggctggaggcccaggctcgcgtgcatcagcttttgctgcagaacaaggacatgctccag

SEQ ID NO: 10156 - DNA, 122 bp, Homo sapiens
  misc_feature (61)..(62): /note="This region represents a CpG dinucleotide"
  misc_feature (61)..(61): /note="Nucleotide may be methylated to form 5-methylcytosine"
cacccggccagtgaactctgaaagctcggtcagtaggtggaggaggaataacggcagcagcgggcaagggaacactcccagaaatcacgcaagaccttcgatgtgcacagtgtggctgcaaa

SEQ ID NO: 10157 - DNA, 122 bp, Homo sapiens
  misc_feature (61)..(62): /note="This region represents a CpG dinucleotide"
  misc_feature (61)..(61): /note="Nucleotide may be methylated to form 5-methylcytosine"
taggaagatgcagaaacaagattagagccaaaccagtcagtcaactgttggtctttttcacgttttactaatactcgtataactagtaagtttcctggcaggttccagttggaaaaactcga

SEQ ID NO: 10158 - DNA, 122 bp, Homo sapiens
  misc_feature (61)..(62): /note="This region represents a CpG dinucleotide"
  misc_feature (61)..(61): /note="Nucleotide may be methylated to form 5-methylcytosine"
cagcaggctggacttgctgctacacccatccatcctgttttctccgctgcaaaacgggtacgtgagtgtcacatgtaagagtgtctggagccacgcaaatgctccataaacatgagccaggc

SEQ ID NO: 10159 - DNA, 122 bp, Homo sapiens
  misc_feature (61)..(62): /note="This region represents a CpG dinucleotide"
  misc_feature (61)..(61): /note="Nucleotide may be methylated to form 5-methylcytosine"
gatcaagagagagtgaacaaaaacaatcaatatggaatctgtgagaagatctcacagcaccggcaggaagaaaattgtcccgaaggttcagatgaagagtttattatctcagaaatgatttt

SEQ ID NO: 10160 - DNA, 122 bp, Homo sapiens
  misc_feature (61)..(62): /note="This region represents a CpG dinucleotide"
  misc_feature (61)..(61): /note="Nucleotide may be methylated to form 5-methylcytosine"
ctgactattaactgattcacttttcatgacccagcctcggaagtcacataggctcctttccgatgtagtcacaagtctagtcagcttcaagggcagggaacatagattccatctcttggtag

SEQ ID NO: 10161 - DNA, 122 bp, Homo sapiens
  misc_feature (61)..(62): /note="This region represents a CpG dinucleotide"
  misc_feature (61)..(61): /note="Nucleotide may be methylated to form 5-methylcytosine"
gcctattgccaattgcatcagagcctgattcactcggtgtaactggggcacgatgtgtatcgcgaggcccttctcagaaccctgctctcctgaggcccggagagaatcagcagttgaatttc

SEQ ID NO: 10162 - DNA, 122 bp, Homo sapiens
  misc_feature (61)..(62): /note="This region represents a CpG dinucleotide"
  misc_feature (61)..(61): /note="Nucleotide may be methylated to form 5-methylcytosine"
agtctcctttctcaccctaatccctataatgtgaggtgtgctagttacttctaggggcatcggagactgtgaaggagagccaggagggagggttgggggtctcctcaggagttgtgagcctt

SEQ ID NO: 10163 - DNA, 122 bp, Homo sapiens
  misc_feature (61)..(62): /note="This region represents a CpG dinucleotide"
  misc_feature (61)..(61): /note="Nucleotide may be methylated to form 5-methylcytosine"
gcatagtggactgtgtggcacagccatctgtgggtgtggtcctggctatgattgcgccaccgcactccagcctgggccttctaaggacagtgacatagtgggtacttgctccagtgacctac

SEQ ID NO: 10164 - DNA, 122 bp, Homo sapiens
  misc_feature (61)..(62): /note="This region represents a CpG dinucleotide"
  misc_feature (61)..(61): /note="Nucleotide may be methylated to form 5-methylcytosine"
tttggcacataatcacatcacctggggagcttgttaaacatacagatgcccaggttctaccgctgaattagaaggtgtgaggtggagccggcccaaatcactcccagctgtaggcccaaggc

SEQ ID NO: 10165 - DNA, 122 bp, Homo sapiens
  misc_feature (61)..(62): /note="This region represents a CpG dinucleotide"
  misc_feature (61)..(61): /note="Nucleotide may be methylated to form 5-methylcytosine"
tactcaccacatctgtcagatcagattcaacttcagaatgaagagaatcccagacaagcccggtcgtttctttgcaatgttcttcatggtcgaggtcatccagctctgtcttctagggaata

SEQ ID NO: 10166 - DNA, 122 bp, Homo sapiens
  misc_feature (61)..(62): /note="This region represents a CpG dinucleotide"
  misc_feature (61)..(61): /note="Nucleotide may be methylated to form 5-methylcytosine"
caggaaactgatcccagtcaggttggttggctctgtcagctgacaggcaggcagtagtagcgggaggcgccaagagtgggaagtatttaaaacaaagtcataggctgggtgtggtggctcat

SEQ ID NO: 10167 - DNA, 122 bp, Homo sapiens
  misc_feature (61)..(62): /note="This region represents a CpG dinucleotide"
  misc_feature (61)..(61): /note="Nucleotide may be methylated to form 5-methylcytosine"
ctgtatggctaacctttctgctgcagtccagggtgttgacactgacatgctgcagtgtaccgtcggtgatttatttaggataaatatgtctcaggtggcatttaatccttcataaaaccagt

SEQ ID NO: 10168 - DNA, 122 bp, Homo sapiens
  misc_feature (61)..(62): /note="This region represents a CpG dinucleotide"
  misc_feature (61)..(61): /note="Nucleotide may be methylated to form 5-methylcytosine"
tctctctgcctagacttgtctgtatgatgtggaacgaacacgacccatctttactgctagcgactgcagcagataaggcaaggccactttcacgcagttaggttaataggaggctgtacaaa

SEQ ID NO: 10169 - DNA, 122 bp, Homo sapiens
  misc_feature (61)..(62): /note="This region represents a CpG dinucleotide"
  misc_feature (61)..(61): /note="Nucleotide may be methylated to form 5-methylcytosine"
agatttgacgtcacagacagcaggcagcacagaggagacatgccacctgttggtgccaagcgtgtcctaccttggaaacatgagcaatcaatgtgctgacctttcttcctggagagtttgag

SEQ ID NO: 10170 - DNA, 122 bp, Homo sapiens
  misc_feature (61)..(62): /note="This region represents a CpG dinucleotide"
  misc_feature (61)..(61): /note="Nucleotide may be methylated to form 5-methylcytosine"
atgagccaccgtgcccggcctgttctatgtgttcttatagtgcaaagcatttgtggaaaacgtgcccttgttagagagttatgttcttctgtactggtatctttgtatgccttttgcgttct

SEQ ID NO: 10171 - DNA, 122 bp, Homo sapiens
  misc_feature (61)..(62): /note="This region represents a CpG dinucleotide"
  misc_feature (61)..(61): /note="Nucleotide may be methylated to form 5-methylcytosine"
ttccctggctaggtaacacatgtctgtttagctcataaaataaatgaactcccagccaggcgcagtggctcacgcctgtaatcccagcactttgggaggccgaggagggtggatcacgaggt

SEQ ID NO: 10172 - DNA, 122 bp, Homo sapiens
  misc_feature (61)..(62): /note="This region represents a CpG dinucleotide"
  misc_feature (61)..(61): /note="Nucleotide may be methylated to form 5-methylcytosine"
tccttcccacttctgtacaagagacaagtcatcacctggtttcaagacaagggagagatgcgggtttctaagagttactgagtccaagcacccagctgtcacagggctgagccaggaaaagg

SEQ ID NO: 10173 - DNA, 122 bp, Homo sapiens
  misc_feature (61)..(62): /note="This region represents a CpG dinucleotide"
  misc_feature (61)..(61): /note="Nucleotide may be methylated to form 5-methylcytosine"
tcctggaacactgaacaaacacccaaagcagggggtgggggaaagaaagcactcaacagccggctgacaacctgattagaaaacctaagggcggggaaggaaaagccagtcccacctttgag

SEQ ID NO: 10174 - DNA, 122 bp, Homo sapiens
  misc_feature (61)..(62): /note="This region represents a CpG dinucleotide"
  misc_feature (61)..(61): /note="Nucleotide may be methylated to form 5-methylcytosine"
cagggagcaggtgtagaggcagcagatccaagaggcttgttgggctggctggggccccggcgtcaggatatgacaccatggtgatgttcctcctgctcttcaccagcaagaagtccttccag

SEQ ID NO: 10175 - DNA, 122 bp, Homo sapiens
  misc_feature (61)..(62): /note="This region represents a CpG dinucleotide"
  misc_feature (61)..(61): /note="Nucleotide may be methylated to form 5-methylcytosine"
taggtggtgagaaggcacctgctttgaaatgctggtgccttgtctgtggtcctgtctgcccgccttctccttggcttcttagacttgctaaaccttgttacactctggcaggaagctctgag

SEQ ID NO: 10176 - DNA, 122 bp, Homo sapiens
  misc_feature (61)..(62): /note="This region represents a CpG dinucleotide"
  misc_feature (61)..(61): /note="Nucleotide may be methylated to form 5-methylcytosine"
aaaccacagtctcaccacaacggggcattccaggagcttgtctgtgtcagcatagatgttcgcctctgcacaaggtgttgtgaattactgtacttgcccttcttctctatctaggtcatttt

SEQ ID NO: 10177 - DNA, 122 bp, Homo sapiens
  misc_feature (61)..(62): /note="This region represents a CpG dinucleotide"
  misc_feature (61)..(61): /note="Nucleotide may be methylated to form 5-methylcytosine"
tgaagcctagcgggtgggcgacttttgggtgaggtcaagaaccatgagagttggaatggacgagaaaaaccaaggctttgggcccagctgcagaactgtgtcatttgccgggaaggttaatg

SEQ ID NO: 10178 - DNA, 122 bp, Homo sapiens
  misc_feature (61)..(62): /note="This region represents a CpG dinucleotide"
  misc_feature (61)..(61): /note="Nucleotide may be methylated to form 5-methylcytosine"
atctgaggccatgtggccactggatccttgctctcacctgacagactagaggggttatttcgtgtgctccctcaccaaagcctgtgaggtgcctgcaggtgcaaggggcagcatgcctccca

SEQ ID NO: 10179 - DNA, 122 bp, Homo sapiens
  misc_feature (61)..(62): /note="This region represents a CpG dinucleotide"
  misc_feature (61)..(61): /note="Nucleotide may be methylated to form 5-methylcytosine"
caccattgataacaggcttgatcacatgacagagggagtgattgtcagacttctccatggcgaagttactcaaaggatgcattccaatcactgagatggaaggggcagtaccccctggcagt

SEQ ID NO: 10180 - DNA, 122 bp, Homo sapiens
  misc_feature (61)..(62): /note="This region represents a CpG dinucleotide"
  misc_feature (61)..(61): /note="Nucleotide may be methylated to form 5-methylcytosine"
acgggaggccgggctgtgcacttgctaacatgctgtgtcagcgagaagtcaaatgatgtacgtggaactggaacatctcccataaattttattaaattttaaactttaataaaacaatgaca

SEQ ID NO: 10181 - DNA, 122 bp, Homo sapiens
  misc_feature (61)..(62): /note="This region represents a CpG dinucleotide"
  misc_feature (61)..(61): /note="Nucleotide may be methylated to form 5-methylcytosine"
gctagatctcagctgggagcaactgaacagggtattccgcaaacacctcactggagtttgcgctcctcaactccatgactgcttcatggttgaatgcttcccggggcctctcagaggtagaa

SEQ ID NO: 10182 - DNA, 122 bp, Homo sapiens
  misc_feature (61)..(62): /note="This region represents a CpG dinucleotide"
  misc_feature (61)..(61): /note="Nucleotide may be methylated to form 5-methylcytosine"
gcacttccttacccagccaagggcacccaatgagatctacctgccccaggccacaaccagcgagagttggctgcaccctaggtcagggtatcaaagagattaaacacaactttttatgagct

SEQ ID NO: 10183 - DNA, 122 bp, Homo sapiens
  misc_feature (61)..(62): /note="This region represents a CpG dinucleotide"
  misc_feature (61)..(61): /note="Nucleotide may be methylated to form 5-methylcytosine"
catgcatcaagggcctaaggatacataatagagccttgattaactcgtctttggtactaccgtaagtactagtgagaggctgcccacccagcatccagttcatccacacactctcctttcta

SEQ ID NO: 10184 - DNA, 122 bp, Homo sapiens
  misc_feature (61)..(62): /note="This region represents a CpG dinucleotide"
  misc_feature (61)..(61): /note="Nucleotide may be methylated to form 5-methylcytosine"
catccttcatccagtggatttgaggagagggctgggcagggacttcacaggtcagggttacggttccaccaggagctactgctccaccttctggctccaccaccaattggacctcctccaga

SEQ ID NO: 10185 - DNA, 122 bp, Homo sapiens
  misc_feature (61)..(62): /note="This region represents a CpG dinucleotide"
  misc_feature (61)..(61): /note="Nucleotide may be methylated to form 5-methylcytosine"
tatatacaagccctaacgcatgcatgcatcttacaagcaacatggacacatacatagcaacgtaaacccagcacacaaatccaaatgtgccaccagatccacactaagccctctatgccaaa

SEQ ID NO: 10186 - DNA, 122 bp, Homo sapiens
  misc_feature (61)..(62): /note="This region represents a CpG dinucleotide"
  misc_feature (61)..(61): /note="Nucleotide may be methylated to form 5-methylcytosine"
aaattccctcacgctgtagcacagtgtacttggctacttcaaccagaaattgtaaactggcggtctgtaggccaatttgaccacacatttattttgtttggctaatatggtggtttttgaga

SEQ ID NO: 10187 - DNA, 122 bp, Homo sapiens
  misc_feature (61)..(62): /note="This region represents a CpG dinucleotide"
  misc_feature (61)..(61): /note="Nucleotide may be methylated to form 5-methylcytosine"
cattacttaagccctcaacaccatcaaatatttatttaacatccactgtgggttaagaatcgcaacccagggccccaaagcaacttacaagctaaaggaaggagtggaggcacagttccttg

SEQ ID NO: 10188 - DNA, 122 bp, Homo sapiens
  misc_feature (61)..(62): /note="This region represents a CpG dinucleotide"
  misc_feature (61)..(61): /note="Nucleotide may be methylated to form 5-methylcytosine"
taatgtctgttgtggcctgaaaagcgtgtgttccttggctccttcctaggctcattcattcgctcatcaagctttgagtgagctcctgccctgtgcccacatgtaggaactcccctctctct

SEQ ID NO: 10189 - DNA, 122 bp, Homo sapiens
  misc_feature (61)..(62): /note="This region represents a CpG dinucleotide"
  misc_feature (61)..(61): /note="Nucleotide may be methylated to form 5-methylcytosine"
tatttcattctacaagacccaaaggcagaattctaaaaactactcttactttttgacaaccgaggagacgtttgctatctgtagggttggcaatttccacaaaaagccaaaatacataattt

SEQ ID NO: 10190 - DNA, 122 bp, Homo sapiens
  misc_feature (61)..(62): /note="This region represents a CpG dinucleotide"
  misc_feature (61)..(61): /note="Nucleotide may be methylated to form 5-methylcytosine"
gtcatccctgtccaccctccacttcttacttcccatatctgatctatctgcaaatcttgtcggttctaacttcggtacataccttctggtcttctcacccctctcctccagactgctgccag

SEQ ID NO: 10191 - DNA, 122 bp, Homo sapiens
  misc_feature (61)..(62): /note="This region represents a CpG dinucleotide"
  misc_feature (61)..(61): /note="Nucleotide may be methylated to form 5-methylcytosine"
ttacaatcaagaggaattgttgcaattcttcatgcctgcctctgtgctaagagtgtaagacggctatcctaaatcctcattatctacttaggccgccttgcctgagccccctctgtctatta

SEQ ID NO: 10192 - DNA, 122 bp, Homo sapiens
  misc_feature (61)..(62): /note="This region represents a CpG dinucleotide"
  misc_feature (61)..(61): /note="Nucleotide may be methylated to form 5-methylcytosine"
gctgcccctcccttactgtgtagagaacttggtgcagcggggccctctttgcccccacaccgaggcatatcttcaggaatttggagcactggctcatctggattagcagcctgagctgccca

SEQ ID NO: 10193 - DNA, 122 bp, Homo sapiens
  misc_feature (61)..(62): /note="This region represents a CpG dinucleotide"
  misc_feature (61)..(61): /note="Nucleotide may be methylated to form 5-methylcytosine"
aaataaggctcaccaccagcacaaacattgttttgaggcattctcaagcccagacaattgcgttgcctgaggctgccccagccgggcactgccctgtggtgtctgttcctccctgaccccag

SEQ ID NO: 10194 - DNA, 122 bp, Homo sapiens
  misc_feature (61)..(62): /note="This region represents a CpG dinucleotide"
  misc_feature (61)..(61): /note="Nucleotide may be methylated to form 5-methylcytosine"
cttcctatgaggaagcccaatcaatcaaaaggtggccactttgctactaagtacttttgccgttagataccttatatccaataaaaagtggcttcctggaatttgaactttctcaccagccc

SEQ ID NO: 10195 - DNA, 122 bp, Homo sapiens
  misc_feature (61)..(62): /note="This region represents a CpG dinucleotide"
  misc_feature (61)..(61): /note="Nucleotide may be methylated to form 5-methylcytosine"
ggattacagatgtgtgccaccatgcccaacctgtacatgtttagttttgtaagaaattgccgaacttcctattgctccatatccttgccagcatttgatgtcagtgttttggatttttgcca

SEQ ID NO: 10196 - DNA, 122 bp, Homo sapiens
  misc_feature (61)..(62): /note="This region represents a CpG dinucleotide"
  misc_feature (61)..(61): /note="Nucleotide may be methylated to form 5-methylcytosine"
acttacagcatgacacataaaggcctctgaggccaagtatacaccagctacatttcctgccgcactcatatttcatattttgccaccacatctttgttatacttctttgcctgaaaaagcct

SEQ ID NO: 10197 - DNA, 122 bp, Homo sapiens
  misc_feature (61)..(62): /note="This region represents a CpG dinucleotide"
  misc_feature (61)..(61): /note="Nucleotide may be methylated to form 5-methylcytosine"
tagtatttaccaatacacaaaggtgtggctatatggttagtcaacatacttaaatactttcgtaatggttaaaaacttttgtgatgattggtcaataaccattgcctcaatccttcctttcc

SEQ ID NO: 10198 - DNA, 122 bp, Homo sapiens
  misc_feature (61)..(62): /note="This region represents a CpG dinucleotide"
  misc_feature (61)..(61): /note="Nucleotide may be methylated to form 5-methylcytosine"
tgaagttcagagtgtacatgatttgctcagggcaagaggcagagcttgtgctcaaactcacgccttgtaatacgagttatatgctcttttgctagccacttacatcagcagtactccagcct

SEQ ID NO: 10199 - DNA, 122 bp, Homo sapiens
  misc_feature (61)..(62): /note="This region represents a CpG dinucleotide"
  misc_feature (61)..(61): /note="Nucleotide may be methylated to form 5-methylcytosine"
gtggtcataattagtcactgctcatttgtgtcatcagtcatcccagttgttttgacacaacgtaacctttggtcatagctttctttcactcttctggttttcacatatgactttgtttagag

SEQ ID NO: 10200 - DNA, 122 bp, Homo sapiens
  misc_feature (61)..(62): /note="This region represents a CpG dinucleotide"
  misc_feature (61)..(61): /note="Nucleotide may be methylated to form 5-methylcytosine"
cactgaactggaagctatgctcctcaaagggtggttactcatacaggtgactatttgtaccgatttagacagctcacccttgaagctcatggaaatatgacaaacaaaaggccattttgttt

SEQ ID NO: 10201 - DNA, 122 bp, Homo sapiens
  misc_feature (61)..(62): /note="This region represents a CpG dinucleotide"
  misc_feature (61)..(61): /note="Nucleotide may be methylated to form 5-methylcytosine"
agacagccataggtgaaccgagctgcccagagtctcacactggtgaaagcagagctgggacgtaaacccagcctgtctgacctggagctcaggctcttacactctgcaagcattgtgcaagg

SEQ ID NO: 10202 - DNA, 122 bp, Homo sapiens
  misc_feature (61)..(62): /note="This region represents a CpG dinucleotide"
  misc_feature (61)..(61): /note="Nucleotide may be methylated to form 5-methylcytosine"
gaagtttggctgtactatttcctagtcatgtgaccttgggtaagttatttaagagcctcacgttcaaggaagggacatcatttgaacaagaccttgaaggttgcacaaaatttaagcatgtg

SEQ ID NO: 10203 - DNA, 122 bp, Homo sapiens
  misc_feature (61)..(62): /note="This region represents a CpG dinucleotide"
  misc_feature (61)..(61): /note="Nucleotide may be methylated to form 5-methylcytosine"
cctcaaaggatgagcaggacttaaagggaccaaggaaaaggacaatccaagcagtgacaacggaatgagaagacaagtaataggccttcagagtgacaaggtcctttggctgaatgcaggct

SEQ ID NO: 10204 - DNA, 122 bp, Homo sapiens
  misc_feature (61)..(62): /note="This region represents a CpG dinucleotide"
  misc_feature (61)..(61): /note="Nucleotide may be methylated to form 5-methylcytosine"
cagtgattaagaatgtggactttggagtctggcagggctggatttatccctcagctcagccgtgtgaccttggccctctaccagcccagccctccccagcctgtagttcctgccccagcctt

SEQ ID NO: 10205 - DNA, 122 bp, Homo sapiens
  misc_feature (61)..(62): /note="This region represents a CpG dinucleotide"
  misc_feature (61)..(61): /note="Nucleotide may be methylated to form 5-methylcytosine"
ccgtgtgttaagcacattcatgttgctgtacaacagatctgtggtctctcctctaacacacgagcaccaggacagacggcatagctgtcctcggcgtggtaggtgggtgagtattcagcagc

SEQ ID NO: 10206 - DNA, 122 bp, Homo sapiens
  misc_feature (61)..(62): /note="This region represents a CpG dinucleotide"
  misc_feature (61)..(61): /note="Nucleotide may be methylated to form 5-methylcytosine"
gctggtgcttgctaggagaggcgtccggagggcctggccgtatgacacacacaggaggaacgaggaggaatcttctaagttacaggctgtgtgtgaatagcaagtacccccttgccttttct

SEQ ID NO: 10207 - DNA, 122 bp, Homo sapiens
  misc_feature (61)..(62): /note="This region represents a CpG dinucleotide"
  misc_feature (61)..(61): /note="Nucleotide may be methylated to form 5-methylcytosine"
tgtggtccctggtcatttcttgtttgcatgctagtcaccttgttatccctaggcatataccgtcaggaaggagcattgtttggtgatgcgggccatcaggacaggttgcccagcctctgaac

SEQ ID NO: 10208 - DNA, 122 bp, Homo sapiens
  misc_feature (61)..(62): /note="This region represents a CpG dinucleotide"
  misc_feature (61)..(61): /note="Nucleotide may be methylated to form 5-methylcytosine"
gacagcagcaggtcagtgagcagcaccagcccgccgagctcagcaggcagctcctccagccggttttccgacacgtccaggcacaccaggcgccgcaggttcccgagctcctgcaggtgggc

SEQ ID NO: 10209 - DNA, 122 bp, Homo sapiens
  misc_feature (61)..(62): /note="This region represents a CpG dinucleotide"
  misc_feature (61)..(61): /note="Nucleotide may be methylated to form 5-methylcytosine"
ctgggagaacatcatcatgcaaggacaaactgggcagaagaaagaacgaggaaagttcaacgtgcagtgatccctactgtctagattggacatggaaagaaagctcagaactctagtggagg

SEQ ID NO: 10210 - DNA, 122 bp, Homo sapiens
  misc_feature (61)..(62): /note="This region represents a CpG dinucleotide"
  misc_feature (61)..(61): /note="Nucleotide may be methylated to form 5-methylcytosine"
ctgcaacatcaggctgaacagggtgcgtgtgctgggactacccagggaatctcctagagccgcaggcaccagggcagggccttaaggagggttgctgggcacagtcactgcagccactccct

SEQ ID NO: 10211 - DNA, 122 bp, Homo sapiens
  misc_feature (61)..(62): /note="This region represents a CpG dinucleotide"
  misc_feature (61)..(61): /note="Nucleotide may be methylated to form 5-methylcytosine"
ggcagagaatatttccctgatggattgactttgggcttggcctgtgactcgctatgactccggaatgtaagtggaagtgacaattgccagtttcccttatgtaattctcctcttcctttgag

SEQ ID NO: 10212 - DNA, 122 bp, Homo sapiens
  misc_feature (61)..(62): /note="This region represents a CpG dinucleotide"
  misc_feature (61)..(61): /note="Nucleotide may be methylated to form 5-methylcytosine"
tccccaaaatgttgccccatatgccttttccttttgatgattttactttgatcctttcaccgtaatccattatagtcacaagtatcactgtatatgctgtaagtcctcctagtgagtcagaa

SEQ ID NO: 10213 - DNA, 122 bp, Homo sapiens
  misc_feature (61)..(62): /note="This region represents a CpG dinucleotide"
  misc_feature (61)..(61): /note="Nucleotide may be methylated to form 5-methylcytosine"
aaataaataaagcaaagaaataaaatacgtggctgctgttgtcagcactgccagactgggcgcgaagtgttttatctctgatctaagaggaaggacgtgctctgctgaagtgagaagggagg

SEQ ID NO: 10214 - DNA, 122 bp, Homo sapiens
  misc_feature (61)..(62): /note="This region represents a CpG dinucleotide"
  misc_feature (61)..(61): /note="Nucleotide may be methylated to form 5-methylcytosine"
ctgcagtcatctgaaggtttggctgaggctgatagagtcatttctaagtcaactcatgtacgtgactgataagttagtacatggtttttggcaagaggtctgtctcacttcctcaccacatt

SEQ ID NO: 10215 - DNA, 122 bp, Homo sapiens
  misc_feature (61)..(62): /note="This region represents a CpG dinucleotide"
  misc_feature (61)..(61): /note="Nucleotide may be methylated to form 5-methylcytosine"
cagtctgtccagcttggggacctgcttttcctcctcctaccaggatttggccaagcatgtcgtggacacttctatggctgatgtgagtaactgctcccacccatccctaccattcctttacc

SEQ ID NO: 10216 - DNA, 122 bp, Homo sapiens
  misc_feature (61)..(62): /note="This region represents a CpG dinucleotide"
  misc_feature (61)..(61): /note="Nucleotide may be methylated to form 5-methylcytosine"
tcagctcctccctttagccttcctggtcatctctgtgatccacaaaatccattgcttcctcgtctatatatgcaatgtccttgctgcagctccagtatcacacttaacacctattcctttcc

SEQ ID NO: 10217 - DNA, 122 bp, Homo sapiens
  misc_feature (61)..(62): /note="This region represents a CpG dinucleotide"
  misc_feature (61)..(61): /note="Nucleotide may be methylated to form 5-methylcytosine"
aaaaatatggtgacaagggatgatgacgtgagtcagagtaaacaccatttactcactttgcgtcactgtttattagaagggctgttcggactttctagttgccaaactggaccgtgtatgct

SEQ ID NO: 10218 - DNA, 122 bp, Homo sapiens
  misc_feature (61)..(62): /note="This region represents a CpG dinucleotide"
  misc_feature (61)..(61): /note="Nucleotide may be methylated to form 5-methylcytosine"
catgctttttcaaaatgagatgttgggatagaagtgcaagaacatcatttccaggaaagacgagtctctaccaggtgtgcccagacagacaggtcctcataggcacgcagagctaggaaagg

SEQ ID NO: 10219 - DNA, 122 bp, Homo sapiens
  misc_feature (61)..(62): /note="This region represents a CpG dinucleotide"
  misc_feature (61)..(61): /note="Nucleotide may be methylated to form 5-methylcytosine"
gactgttctttctgaactgtccctagtggtgctttgtcatactgctcacctagcagctatcgtactttgttctctgaccagttattcctgtcttttaaaaaggcagtatgtgtaaagcatcg

SEQ ID NO: 10220 - DNA, 122 bp, Homo sapiens
  misc_feature (61)..(62): /note="This region represents a CpG dinucleotide"
  misc_feature (61)..(61): /note="Nucleotide may be methylated to form 5-methylcytosine"
atgaacattttttcatactgggaccctgatattctactttaggatctggggagtttattacgtgcattttaaaagatgctgttatcggccgggcatggtgactcatgcctgtaatcccagca

SEQ ID NO: 10221 - DNA, 122 bp, Homo sapiens
  misc_feature (61)..(62): /note="This region represents a CpG dinucleotide"
  misc_feature (61)..(61): /note="Nucleotide may be methylated to form 5-methylcytosine"
agcccagaaaccaagggcgtggcgggactcacaggcagggagcggtgaggcagagctgtccgctggagcgagcccctgctctagggccatggccctcggggtccgttcatgcagcaagccac

SEQ ID NO: 10222 - DNA, 122 bp, Homo sapiens
  misc_feature (61)..(62): /note="This region represents a CpG dinucleotide"
  misc_feature (61)..(61): /note="Nucleotide may be methylated to form 5-methylcytosine"
gaagagcaaatcactaagcaaacgaaattaaacgcccaaacactgcaagtacaaacaaaccgcacttccctctgtggagtgagatcagggctcatcactggacattgaaaataaaacaattc

SEQ ID NO: 10223 - DNA, 122 bp, Homo sapiens
  misc_feature (61)..(62): /note="This region represents a CpG dinucleotide"
  misc_feature (61)..(61): /note="Nucleotide may be methylated to form 5-methylcytosine"
cagtaaattgcccaaggtcctacagcagagctgagattcagtgtcagctgggattccaatcgttgaaaccctatttggctttcaagtccactctctttctgctggccacactatagtatcaa

SEQ ID NO: 10224 - DNA, 122 bp, Homo sapiens
  misc_feature (61)..(62): /note="This region represents a CpG dinucleotide"
  misc_feature (61)..(61): /note="Nucleotide may be methylated to form 5-methylcytosine"
gctccctgggagctccacccaggctgccatggggaggggaaggaaggcctttatagtttccggctcacatctcaaggcagtcagtctgggaaatggccttggtcccctgccctaccctggca

SEQ ID NO: 10225 - DNA, 122 bp, Homo sapiens
  misc_feature (61)..(62): /note="This region represents a CpG dinucleotide"
  misc_feature (61)..(61): /note="Nucleotide may be methylated to form 5-methylcytosine"
tggccagaccgtgaaggttaccttgaccttgtctgcatgataaatacaactggagcggggcggaaggcacaccattcagaaaagcaaactgcttgcatcttctttatttttaatctcactcc

SEQ ID NO: 10226 - DNA, 122 bp, Homo sapiens
  misc_feature (61)..(62): /note="This region represents a CpG dinucleotide"
  misc_feature (61)..(61): /note="Nucleotide may be methylated to form 5-methylcytosine"
cccttcccctaaaggttgtttgagcaggaatccaaccagcaattactatatttccatttgcgattagaaaagaagaggtttttcttatctgcaaacatttggccaccaaatcccaggagtat

SEQ ID NO: 10227 - DNA, 122 bp, Homo sapiens
  misc_feature (61)..(62): /note="This region represents a CpG dinucleotide"
  misc_feature (61)..(61): /note="Nucleotide may be methylated to form 5-methylcytosine"
ggcactgtgctagcccactctggctcatttaatcctctcctaagaagagaggagacacagcgtccccatttgacagatgcagaaagaggttccacaggtgtgccttgattctgtcctaaaac

SEQ ID NO: 10228 - DNA, 122 bp, Homo sapiens
  misc_feature (61)..(62): /note="This region represents a CpG dinucleotide"
  misc_feature (61)..(61): /note="Nucleotide may be methylated to form 5-methylcytosine"
cttccacgcctgacctctcccagccccaaattctactgcccaagataattggagctgggccggagcccaatgctgcttcagccccaaaaccaaaaccacactggcttgagtaagagaggcct

SEQ ID NO: 10229 - DNA, 122 bp, Homo sapiens
  misc_feature (61)..(62): /note="This region represents a CpG dinucleotide"
  misc_feature (61)..(61): /note="Nucleotide may be methylated to form 5-methylcytosine"
ctctaaatccctctgctttgccatgctacatctttgcattaaaggattttcactagtagccgtggtgatggtttattttaggcagtttcactaccagctatgctctctcttgtttctatgcc

SEQ ID NO: 10230 - DNA, 122 bp, Homo sapiens
  misc_feature (61)..(62): /note="This region represents a CpG dinucleotide"
  misc_feature (61)..(61): /note="Nucleotide may be methylated to form 5-methylcytosine"
tggactgagtatctggaaagccagtctgcaggatgggttctgagggcagaacccagaggacgtgcagtgaggaagctggaagagagcacactccctgggttcctttggtttactgtcctatt

SEQ ID NO: 10231 - DNA, 122 bp, Homo sapiens
  misc_feature (61)..(62): /note="This region represents a CpG dinucleotide"
  misc_feature (61)..(61): /note="Nucleotide may be methylated to form 5-methylcytosine"
ctgactaaagagcccttgggccctgaataatcagcagcggtggccaggccaggtggttcacgctgtgggccttaggtgagactcaaacgtgatggcttcaggtggaacctggcacattcccg

SEQ ID NO: 10232 - DNA, 122 bp, Homo sapiens
  misc_feature (61)..(62): /note="This region represents a CpG dinucleotide"
  misc_feature (61)..(61): /note="Nucleotide may be methylated to form 5-methylcytosine"
ttgagttctcattttattatttcctatgagagctgattgtttaaaagtctgtcacctccccgcctctttttcctgcttcttctctcatcaactgttctctgcacatgccaactttagtggaa

SEQ ID NO: 10233 - DNA, 122 bp, Homo sapiens
  misc_feature (61)..(62): /note="This region represents a CpG dinucleotide"
  misc_feature (61)..(61): /note="Nucleotide may be methylated to form 5-methylcytosine"
tatatctatacctgtgtcacacttgcctccttatttctcaaacacaccctcttggctgggcgtggtgtctcacgcctgtaatcccagcactttgggagaccgagactggcaggtcacttgag

SEQ ID NO: 10234 - DNA, 122 bp, Homo sapiens
  misc_feature (61)..(62): /note="This region represents a CpG dinucleotide"
  misc_feature (61)..(61): /note="Nucleotide may be methylated to form 5-methylcytosine"
tactcactaattccacaaacatttgctaagcatgtattcagtgttgggcaccatgcaagacgctgtagatacaatggtgaggaaagacaaatatggcatgtcttatcttggatctggtggtc

SEQ ID NO: 10235 - DNA, 122 bp, Homo sapiens
  misc_feature (61)..(62): /note="This region represents a CpG dinucleotide"
  misc_feature (61)..(61): /note="Nucleotide may be methylated to form 5-methylcytosine"
aaatgtgtttcttatgtaatgtttgcaggcagggtttcctgttgtacagcctacagcccccgcaagataaagcaccccttggaaaagaacaagatgacaaagatcctagttcttggaggagg

SEQ ID NO: 10236 - DNA, 122 bp, Homo sapiens
  misc_feature (61)..(62): /note="This region represents a CpG dinucleotide"
  misc_feature (61)..(61): /note="Nucleotide may be methylated to form 5-methylcytosine"
agttgggttgtccttggacaaactgcttgacctctgtaaatcttctgtccttatctgtaacgtaggggtgctaattagcattaattagctcattgttgggaggattaaatgagaacacccct

SEQ ID NO: 10237 - DNA, 122 bp, Homo sapiens
  misc_feature (61)..(62): /note="This region represents a CpG dinucleotide"
  misc_feature (61)..(61): /note="Nucleotide may be methylated to form 5-methylcytosine"
ggtggcagtacaggcttctttataaggatgaatgaagatgaaaagcaagacaaatagaagcgaatgagacactgctttatgtgattcatgatagcttgccgtaagcctgttagcctctgcct

SEQ ID NO: 10238 - DNA, 122 bp, Homo sapiens
  misc_feature (61)..(62): /note="This region represents a CpG dinucleotide"
  misc_feature (61)..(61): /note="Nucleotide may be methylated to form 5-methylcytosine"
tttaaagactttgttaatgccagcagcaagtatgaaatcacgaccattcataatctcttccgtaagctgactcatcgcctcttcaggaggaattttgggtacacactgcggtcagtcaatga

SEQ ID NO: 10239 - DNA, 122 bp, Homo sapiens
  misc_feature (61)..(62): /note="This region represents a CpG dinucleotide"
  misc_feature (61)..(61): /note="Nucleotide may be methylated to form 5-methylcytosine"
ctgaccaaggggagaggctggaaggcagttttgccagctccaccgcctgtctttatgtgccgattcacgaagctaccttccttcttgcctttgatgtcagaaatccaaaagcgggtgagtaa

SEQ ID NO: 10240 - DNA, 122 bp, Homo sapiens
  misc_feature (61)..(62): /note="This region represents a CpG dinucleotide"
  misc_feature (61)..(61): /note="Nucleotide may be methylated to form 5-methylcytosine"
ccaaagcaaccccagataaattcccttcactctttccccctttgttagcaaggtgggaaacgctgcccttcgtaccaccatgagatgatacagtaggtctaaagctgggaaggcacaggttt

SEQ ID NO: 10241 - DNA, 122 bp, Homo sapiens
  misc_feature (61)..(62): /note="This region represents a CpG dinucleotide"
  misc_feature (61)..(61): /note="Nucleotide may be methylated to form 5-methylcytosine"
tcttggcattagctgtatattttgctacttaaaaactgagctgccgggcgtgttggctcacgcctgtaatcccagcactttgggaggctgaggtgggcagatcacaaggtcaggagatcgag

SEQ ID NO: 10242 - DNA, 122 bp, Homo sapiens
  misc_feature (61)..(62): /note="This region represents a CpG dinucleotide"
  misc_feature (61)..(61): /note="Nucleotide may be methylated to form 5-methylcytosine"
ttcatgcacacttagtctgtttggcaaggcttttgggctctatttccaaagcgggcctttcgtccaaatacctctctccatctccacagctgaaaccctaaaccaagcccgtgctgtctctg

SEQ ID NO: 10243 - DNA, 122 bp, Homo sapiens
  misc_feature (61)..(62): /note="This region represents a CpG dinucleotide"
  misc_feature (61)..(61): /note="Nucleotide may be methylated to form 5-methylcytosine"
accgcgcccggcctgcatccagcagcttttgctgggttaggagtaatcacagccctgcctcgttgcttgatttgcaggcagcacccggtacacacccaagacaggcagcaccatctacactg

SEQ ID NO: 10244 - DNA, 122 bp, Homo sapiens
  misc_feature (61)..(62): /note="This region represents a CpG dinucleotide"
  misc_feature (61)..(61): /note="Nucleotide may be methylated to form 5-methylcytosine"
gtcataatccgtggatgacaagtcagccagggtcagtatgtagtgactctgttgggtgtacgtgcttgagccacacacacagcagtgcaaaacctgtgaaaacagaggccatgtgcaccacg

SEQ ID NO: 10245 - DNA, 122 bp, Homo sapiens
  misc_feature (61)..(62): /note="This region represents a CpG dinucleotide"
  misc_feature (61)..(61): /note="Nucleotide may be methylated to form 5-methylcytosine"
tgcagggtgcagagattcaaacacagtgctgggaccactctcttctggatttgactcatgcgtgagaggaataaacctatacattttacttagccacctgcttttcggaatttgtgggcaag

SEQ ID NO: 10246 - DNA, 122 bp, Homo sapiens
  misc_feature (61)..(62): /note="This region represents a CpG dinucleotide"
  misc_feature (61)..(61): /note="Nucleotide may be methylated to form 5-methylcytosine"
gtgataacacctacctcagcctcccaaagtgctgggattacaggtatgagccaccatgcccggacaagattatcctggcccttggtgtaaagagtgatctttgacttgcaacctggacattc

SEQ ID NO: 10247 - DNA, 122 bp, Homo sapiens
  misc_feature (61)..(62): /note="This region represents a CpG dinucleotide"
  misc_feature (61)..(61): /note="Nucleotide may be methylated to form 5-methylcytosine"
cattagcctaaatacttctgtcttagtcagctcagactgtgcaacttttataaacaacatcgattcattgcttacagttctggaggttgggaagtccaaggtcaaggcactggcagattcgg

SEQ ID NO: 10248 - DNA, 122 bp, Homo sapiens
  misc_feature (61)..(62): /note="This region represents a CpG dinucleotide"
  misc_feature (61)..(61): /note="Nucleotide may be methylated to form 5-methylcytosine"
aaatcttccagcttctcttccacgttccacaatgtccaagggagccagctgccaagtccacggtccagacgaacctgtctgacacctgcctgtgcctaaaagctggccaggcacagcaggag

SEQ ID NO: 10249 - DNA, 122 bp, Homo sapiens
  misc_feature (61)..(62): /note="This region represents a CpG dinucleotide"
  misc_feature (61)..(61): /note="Nucleotide may be methylated to form 5-methylcytosine"
ttctcaccaaaaactggcaacctaaatttaatcatgaagaatcaccagacaggccgggcacggtggctcactccttgggaggctaaggcggccaaatcacttgaggtcaggagtttgagatc

SEQ ID NO: 10250 - DNA, 122 bp, Homo sapiens
  misc_feature (61)..(62): /note="This region represents a CpG dinucleotide"
  misc_feature (61)..(61): /note="Nucleotide may be methylated to form 5-methylcytosine"
agtcacagtttccacccacactcaggggaagggattatactggatgtgaacaccaagtggcggagatccctggagatcacctgagggtcttctggccacactgctttgtatctctgtcccca

SEQ ID NO: 10251 - DNA, 122 bp, Homo sapiens
  misc_feature (61)..(62): /note="This region represents a CpG dinucleotide"
  misc_feature (61)..(61): /note="Nucleotide may be methylated to form 5-methylcytosine"
ctggagttgattcatacagtagtcatcaatggatacaaagcctggtgggtggaggtttgacggggaatgggatattagggtagttgcagagtatttcccagaaaatacttattatttggaaa

SEQ ID NO: 10252 - DNA, 122 bp, Homo sapiens
  misc_feature (61)..(62): /note="This region represents a CpG dinucleotide"
  misc_feature (61)..(61): /note="Nucleotide may be methylated to form 5-methylcytosine"
ctgactcctgatcttttagtagggaggaggaggagagtgaggtggtttagcttaagatgacgtatatgaatcatcaagttagagataccttgaagatctcttgcaaaattacccttctcata

SEQ ID NO: 10253 - DNA, 122 bp, Homo sapiens
  misc_feature (61)..(62): /note="This region represents a CpG dinucleotide"
  misc_feature (61)..(61): /note="Nucleotide may be methylated to form 5-methylcytosine"
tttatataatcacacctacagaacacaaggtgaagtggatatttaacaatttcccagttacgtaagtattcacaggtaaactggctaatgcgagacagaagagctttagtttgtactgaatt

SEQ ID NO: 10254 - DNA, 122 bp, Homo sapiens
  misc_feature (61)..(62): /note="This region represents a CpG dinucleotide"
  misc_feature (61)..(61): /note="Nucleotide may be methylated to form 5-methylcytosine"
cttgcagttctgaaagcttgctgacagtaggttctctttatctccaccctttcactgaagcgtcttagcccaggagggttgaacccgtattagaagcccatgcctaaattaaatttcttaag

SEQ ID NO: 10255 - DNA, 122 bp, Homo sapiens
  misc_feature (61)..(62): /note="This region represents a CpG dinucleotide"
  misc_feature (61)..(61): /note="Nucleotide may be methylated to form 5-methylcytosine"
ttgaatcccaaatgttccttataaatggctcttccatttctcaagcagattaagtacatgcgctgcagtaattcaagtcttagaacttattaaagtgagataatatgaagctcctttgtcat

SEQ ID NO: 10256 - DNA, 122 bp, Homo sapiens
  misc_feature (61)..(62): /note="This region represents a CpG dinucleotide"
  misc_feature (61)..(61): /note="Nucleotide may be methylated to form 5-methylcytosine"
ttctctggctggacgctgctcaatccactgcctagcaggtggcccattccagttggagaacgtagtgagtctttcagtggagccagggtctggtaagtctcctagcagggtctgggggagag

SEQ ID NO: 10257 - DNA, 122 bp, Homo sapiens
  misc_feature (61)..(62): /note="This region represents a CpG dinucleotide"
  misc_feature (61)..(61): /note="Nucleotide may be methylated to form 5-methylcytosine"
agctcattttcatgtgctcccagaggtctggccaaggtgccataggccttcatggaagggcgtgcaccatcatgctaggcttgaggattcctgaaaaagcatactgaagctctggaaggaac

SEQ ID NO: 10258 - DNA, 122 bp, Homo sapiens
  misc_feature (61)..(62): /note="This region represents a CpG dinucleotide"
  misc_feature (61)..(61): /note="Nucleotide may be methylated to form 5-methylcytosine"
gctcttaacaatcatctcctataatttcctgaaagtattaaagtgtcactttcagctgggcgaggtggctcaagcctgtagtcccagcactttgggaggccgaggagggcggatcacttgaa

SEQ ID NO: 10259 - DNA, 122 bp, Homo sapiens
  misc_feature (61)..(62): /note="This region represents a CpG dinucleotide"
  misc_feature (61)..(61): /note="Nucleotide may be methylated to form 5-methylcytosine"
catttgggatattaccagttcttgccattgtgttctcatgctgctgtagattcctattgccgtcctataccattctggtgattcagctactctctgtagctgctattcctgctactgagcaa

SEQ ID NO: 10260 - DNA, 122 bp, Homo sapiens
  misc_feature (61)..(62): /note="This region represents a CpG dinucleotide"
  misc_feature (61)..(61): /note="Nucleotide may be methylated to form 5-methylcytosine"
acaaaatggctcccaatccaggcaactggcacatgtggaagcagaataccaaagcaaatccgtcttccaaccatcagcttcgactccctccagctactgtatttacatttaccttgacagag

SEQ ID NO: 10261 - DNA, 122 bp, Homo sapiens
  misc_feature (61)..(62): /note="This region represents a CpG dinucleotide"
  misc_feature (61)..(61): /note="Nucleotide may be methylated to form 5-methylcytosine"
gaccctccagctgtatccacagttcggccaggaacaggctctgccagaggctagggccagcgctacatagtctgtggttaatggaggtgactagggaggggtgagcacaccagctgctctag

SEQ ID NO: 10262 - DNA, 122 bp, Homo sapiens
  misc_feature (61)..(62): /note="This region represents a CpG dinucleotide"
  misc_feature (61)..(61): /note="Nucleotide may be methylated to form 5-methylcytosine"
ttaccccacccaaacctgacagtcatgcagccttgggcttggctctaacctgtcaactggcggtgtgaccttgagcaagtcctggcctctcagcagcctctgtaaaaatgaggttgttgcat

SEQ ID NO: 10263 - DNA, 122 bp, Homo sapiens
  misc_feature (61)..(62): /note="This region represents a CpG dinucleotide"
  misc_feature (61)..(61): /note="Nucleotide may be methylated to form 5-methylcytosine"
gaatcagacacggcagtccagggtgtgcactgcacaagggtagttggcccaggaagcgagcgagagctggaacacagcttacacttggctaactgagccacatgctgggcacagggcttcct

SEQ ID NO: 10264 - DNA, 122 bp, Homo sapiens
  misc_feature (61)..(62): /note="This region represents a CpG dinucleotide"
  misc_feature (61)..(61): /note="Nucleotide may be methylated to form 5-methylcytosine"
gtgattaaataggtgtgcgactgcttggtcagtaacagtcttctgccagactgtgtcttccgtgagggtaacagagaccatgtctgtttttgctcatccttgtgccttggtgcccagcacca

SEQ ID NO: 10265 - DNA, 122 bp, Homo sapiens
  misc_feature (61)..(62): /note="This region represents a CpG dinucleotide"
  misc_feature (61)..(61): /note="Nucleotide may be methylated to form 5-methylcytosine"
aacagcagaatgactcattgagccattgagccattcagcacattctctatatggcagattcggtgctgtctctggaaatacataaacatagagcgattcctttttctgttgaggcaaaatat

SEQ ID NO: 10266 - DNA, 122 bp, Homo sapiens
  misc_feature (61)..(62): /note="This region represents a CpG dinucleotide"
  misc_feature (61)..(61): /note="Nucleotide may be methylated to form 5-methylcytosine"
gggattataggtatgagccacccagaagctcttttgctatcatgggaccagcatgactggcgctaacagccgatcctctctcaggttttacaggtgtgactgtaccgtcgtaggacgggaat

SEQ ID NO: 10267 - DNA, 122 bp, Homo sapiens
  misc_feature (61)..(62): /note="This region represents a CpG dinucleotide"
  misc_feature (61)..(61): /note="Nucleotide may be methylated to form 5-methylcytosine"
ttcctcaagccttgcctccaggagtcaagtggggccaggcctgggtctctgggcagtgaccgtgtgaggtgccacgtgcagacgcccatgaaagacgcctccggaaggcagatgaagagctc

SEQ ID NO: 10268 - DNA, 122 bp, Homo sapiens
  misc_feature (61)..(62): /note="This region represents a CpG dinucleotide"
  misc_feature (61)..(61): /note="Nucleotide may be methylated to form 5-methylcytosine"
cacactgtgccaggattgtggggggctgaaccccaacatgtgttgccaaatcgagagttccgtgtcatgtgaggcatcttgcctaagtagttttcagggatgtggaagattcacgttggtat

SEQ ID NO: 10269 - DNA, 122 bp, Homo sapiens
  misc_feature (61)..(62): /note="This region represents a CpG dinucleotide"
  misc_feature (61)..(61): /note="Nucleotide may be methylated to form 5-methylcytosine"
ttccattgttcatgtagttatgccttgaagaacatatgttgggaaagagaggctgtgttacgccacactgcctgtccactgaggccagaaaggatacctgaggacacaggaaatgtcacact

SEQ ID NO: 10270 - DNA, 122 bp, Homo sapiens
  misc_feature (61)..(62): /note="This region represents a CpG dinucleotide"
  misc_feature (61)..(61): /note="Nucleotide may be methylated to form 5-methylcytosine"
cagggtgtgctttattgcatagctgcttgggagtttttctttagctgccccatctgttggcgaggatgcggcatctgaatgaggcccagggctgcagtggggaatgtgaacccgctgtcctt

SEQ ID NO: 10271 - DNA, 122 bp, Homo sapiens
  misc_feature (61)..(62): /note="This region represents a CpG dinucleotide"
  misc_feature (61)..(61): /note="Nucleotide may be methylated to form 5-methylcytosine"
ctggaactaagtccaggggttcttttcacttatgctaccactggtggtaaatataaggtgcgttaattggagtaggctagcaaaaccagtatctcggggcttaactccataaaggcttatgt

SEQ ID NO: 10272 - DNA, 122 bp, Homo sapiens
  misc_feature (61)..(62): /note="This region represents a CpG dinucleotide"
  misc_feature (61)..(61): /note="Nucleotide may be methylated to form 5-methylcytosine"
tatacctcaactagctctagtgaggtcagaatgactaacatcatcaaacctaggattacacgaaccttaaatcccaggaggtgtgggcagccattagtcagagtattcaactttattcacaa

SEQ ID NO: 10273 - DNA, 122 bp, Homo sapiens
  misc_feature (61)..(62): /note="This region represents a CpG dinucleotide"
  misc_feature (61)..(61): /note="Nucleotide may be methylated to form 5-methylcytosine"
ttggtctgggatatgacctgagcgatgggatttttagaagtttcccaggtgattataatacgaagccaaggttgagaaccacaggtctacagctaatgccacagcccaaagaataagtctat

SEQ ID NO: 10274 - DNA, 122 bp, Homo sapiens
  misc_feature (61)..(62): /note="This region represents a CpG dinucleotide"
  misc_feature (61)..(61): /note="Nucleotide may be methylated to form 5-methylcytosine"
ctgtgataccatgacagtgaatctacacccaagatggctactaagtgactaatggcaatccgtgcaggacagaccagggtggagcaagatttcatcattggtactcagaatggtgtgcaatt

SEQ ID NO: 10275 - DNA, 122 bp, Homo sapiens
  misc_feature (61)..(62): /note="This region represents a CpG dinucleotide"
  misc_feature (61)..(61): /note="Nucleotide may be methylated to form 5-methylcytosine"
atcaggcctcaaactccttatccgcagttcgttctcaaaaaacagccaacgcggcagctccgggtgaccaggattgcaacaccaaatgtgtttgttccccatgtttgtgaaatacctcagag

SEQ ID NO: 10276 - DNA, 122 bp, Homo sapiens
  misc_feature (61)..(62): /note="This region represents a CpG dinucleotide"
  misc_feature (61)..(61): /note="Nucleotide may be methylated to form 5-methylcytosine"
ttttctaagcaggatttgccagtttggggaatggcatcatcagcaccccaggtgttaacccgcaggcctcctcacctgtgggaaaactacaggggttctctcaagggagcttcaacttctct

SEQ ID NO: 10277 - DNA, 122 bp, Homo sapiens
  misc_feature (61)..(62): /note="This region represents a CpG dinucleotide"
  misc_feature (61)..(61): /note="Nucleotide may be methylated to form 5-methylcytosine"
aataaacaaaagcagctaccacttctagaatgctccatgtgcgatgagaactattctaagcggctgtgagtagtaactgacacaatgcataagcagccagcaattccattctgctgggctgg

SEQ ID NO: 10278 - DNA, 122 bp, Homo sapiens
  misc_feature (61)..(62): /note="This region represents a CpG dinucleotide"
  misc_feature (61)..(61): /note="Nucleotide may be methylated to form 5-methylcytosine"
agttgtgtacatgcaagctattatcactgttacagttcttcctctgacttaacctgagaccggtatgtggagctatcttcattaagatatccattaagaaatttagtgaatgagaaagattt

SEQ ID NO: 10279 - DNA, 122 bp, Homo sapiens
  misc_feature (61)..(62): /note="This region represents a CpG dinucleotide"
  misc_feature (61)..(61): /note="Nucleotide may be methylated to form 5-methylcytosine"
caccccagggtcccccttccagcagatgcagagcacccttctccctgcaaggcctgagagcggctgccatgggccgtcttgagctgtgtgacatccctgtaccaatcctaggagctgggagt

SEQ ID NO: 10280 - DNA, 122 bp, Homo sapiens
  misc_feature (61)..(62): /note="This region represents a CpG dinucleotide"
  misc_feature (61)..(61): /note="Nucleotide may be methylated to form 5-methylcytosine"
tctaatgtttcaagtgacaaacaatgccttggtgaactttctctagaacaactcattcagcgcatgcacaagtttctctaggctctaagctgtgtacctagggctgagatcaccaggcggag

SEQ ID NO: 10281 - DNA, 122 bp, Homo sapiens
  misc_feature (61)..(62): /note="This region represents a CpG dinucleotide"
  misc_feature (61)..(61): /note="Nucleotide may be methylated to form 5-methylcytosine"
aagtgagggacataatatgcaatgtgtcccaaccaaatttgaccctagaagacgtttcttcgtggagaatctcttacaggtttggtgctctgcaagacgcagattaaagccccaccctttag

SEQ ID NO: 10282 - DNA, 122 bp, Homo sapiens
  misc_feature (61)..(62): /note="This region represents a CpG dinucleotide"
  misc_feature (61)..(61): /note="Nucleotide may be methylated to form 5-methylcytosine"
aggttagcatgtaattacagcactgtattctaaattgaatagaggtgtggacagagactgcgactaactcttacacactggatagaggctgcagctaactcttacacacccaggagtcacca

SEQ ID NO: 10283 - DNA, 122 bp, Homo sapiens
  misc_feature (61)..(62): /note="This region represents a CpG dinucleotide"
  misc_feature (61)..(61): /note="Nucleotide may be methylated to form 5-methylcytosine"
tgggcatataaaagcgttttggttatgcaatcaaactagaaatctccctcactgtgtgaacgacccaattgagcaaccaagtaaacctgaagctctgtgcctgctgaacagctcatggtctt

SEQ ID NO: 10284 - DNA, 122 bp, Homo sapiens
  misc_feature (61)..(62): /note="This region represents a CpG dinucleotide"
  misc_feature (61)..(61): /note="Nucleotide may be methylated to form 5-methylcytosine"
taagagctaaaaacagaaaagactaagctccactttcctcaaagactaaatctcttgagacgctgatgattctggcttccttgaatgtgcctggggtaataaaaataattttagaccagggt

SEQ ID NO: 10285 - DNA, 122 bp, Homo sapiens
  misc_feature (61)..(62): /note="This region represents a CpG dinucleotide"
  misc_feature (61)..(61): /note="Nucleotide may be methylated to form 5-methylcytosine"
gcctcctatctcccgcatgttcccagaggcaaagcagctgctctgctgacggtgctcaggcgttgaccactcctttgatgtacaggcctgtgggtttgaagggctgtttgctttcacgtcct

SEQ ID NO: 10286 - DNA, 122 bp, Homo sapiens
  misc_feature (61)..(62): /note="This region represents a CpG dinucleotide"
  misc_feature (61)..(61): /note="Nucleotide may be methylated to form 5-methylcytosine"
agcctctgttctgggcatgctggcattgctgctggcctgggaacatgacctgctcatgctcgcccctgcatttccagttgtgctaggtgcccgtccagctgggttttctctcccccaaacct

SEQ ID NO: 10287 - DNA, 122 bp, Homo sapiens
  misc_feature (61)..(62): /note="This region represents a CpG dinucleotide"
  misc_feature (61)..(61): /note="Nucleotide may be methylated to form 5-methylcytosine"
gaatttattcttctataatcctttcttcatcattctgcatgaatgtgatcatatttttgccgagggcaaagctttcaaagacttatgttgaaaaattgaacaaaaggatgcaaaaaaaaagg

SEQ ID NO: 10288 - DNA, 122 bp, Homo sapiens
  misc_feature (61)..(62): /note="This region represents a CpG dinucleotide"
  misc_feature (61)..(61): /note="Nucleotide may be methylated to form 5-methylcytosine"
ttccctgttaatcattttcaatccaatcacatgatctccaaatctacttaatcctcctaacgtaagcattcttcattcattcacccaacaaatacttactgagcatctattgtccagcactg

SEQ ID NO: 10289 - DNA, 122 bp, Homo sapiens
  misc_feature (61)..(62): /note="This region represents a CpG dinucleotide"
  misc_feature (61)..(61): /note="Nucleotide may be methylated to form 5-methylcytosine"
cagggtgactctaagtgcaccggagccactgcggccctggacgaagatgggcccgttccacgtgaagaaaaggctctgtgacctacctaaagttctgaacagcagtggtttaaagacataat

SEQ ID NO: 10290 - DNA, 122 bp, Homo sapiens
  misc_feature (61)..(62): /note="This region represents a CpG dinucleotide"
  misc_feature (61)..(61): /note="Nucleotide may be methylated to form 5-methylcytosine"
gcgaagcacgtcaagactcaccagaataagaagctcaaagtcgctgaggccggggttaagcgggaggacgcgcgggacctgtgagccctcccggaggtggacccccttcccagcacctctgc

SEQ ID NO: 10291 - DNA, 122 bp, Homo sapiens
  misc_feature (61)..(62): /note="This region represents a CpG dinucleotide"
  misc_feature (61)..(61): /note="Nucleotide may be methylated to form 5-methylcytosine"
gttcacaatgagcctcaccccaccccggccccgcatcaccagttcctcttggtggcaccacgtgaccatacacactcttttggccacacaggagcctgtggggtcactgtctgtcctctgct

SEQ ID NO: 10292 - DNA, 122 bp, Homo sapiens
  misc_feature (61)..(62): /note="This region represents a CpG dinucleotide"
  misc_feature (61)..(61): /note="Nucleotide may be methylated to form 5-methylcytosine"
cttgccggggagcacaaaggtctaaacagatgatacgatatactgttatactgctgatggcgatgacttctagatttttattactaatcagaggacatgtgtttgtgtgtctgtgtaagtga

SEQ ID NO: 10293 - DNA, 122 bp, Homo sapiens
  misc_feature (61)..(62): /note="This region represents a CpG dinucleotide"
  misc_feature (61)..(61): /note="Nucleotide may be methylated to form 5-methylcytosine"
ttagggatgatccagggtacagcccagaggacctgatggtggttctcagccctgtctggtcgtcagaatcacctggggagattttagtacaaccaggtctggccctgccctctggagagcaa

SEQ ID NO: 10294 - DNA, 122 bp, Homo sapiens
  misc_feature (61)..(62): /note="This region represents a CpG dinucleotide"
  misc_feature (61)..(61): /note="Nucleotide may be methylated to form 5-methylcytosine"
aaaatggaaaaatgcaggtactttcctctcctcagagatagcttctattaaaaatcttcacgtcagctgggcacggtgactcatgcctgtaatcccagcactttgggaggccaaggcaggcg

SEQ ID NO: 10295 - DNA, 122 bp, Homo sapiens
  misc_feature (61)..(62): /note="This region represents a CpG dinucleotide"
  misc_feature (61)..(61): /note="Nucleotide may be methylated to form 5-methylcytosine"
accgaaacaaagaaacaaatttaccgtgggcctaatctgttttaaactttttcctcaatacgtagcaatggattatcaactgctcgatgcaggattttgtcactttatttcttttgtgaaag

SEQ ID NO: 10296 - DNA, 122 bp, Homo sapiens
  misc_feature (61)..(62): /note="This region represents a CpG dinucleotide"
  misc_feature (61)..(61): /note="Nucleotide may be methylated to form 5-methylcytosine"
gcagtcaattgattacttgtcagtttccaaaatggtctcatctccagaagaaacaatgcacgaaaaagcagttctgaaaagagaattaagagcttgttagacacgggcctcaggtcaggata

SEQ ID NO: 10297 - DNA, 122 bp, Homo sapiens
  misc_feature (61)..(62): /note="This region represents a CpG dinucleotide"
  misc_feature (61)..(61): /note="Nucleotide may be methylated to form 5-methylcytosine"
ccttcttcacccagtaggcttcattctcttttctgagtcctacctctgtgtcttcacatgcgacagccactattaccctggcactttccttgtgtgtgtgtcacagccctagcgagtttcct

SEQ ID NO: 10298 - DNA, 122 bp, Homo sapiens
  misc_feature (61)..(62): /note="This region represents a CpG dinucleotide"
  misc_feature (61)..(61): /note="Nucleotide may be methylated to form 5-methylcytosine"
taatttatgcaactaacttatgtggtaggtagaataatgcctctcttccccaaaaatgtccgtatcctaactccaggaacctgtgaaaacaggagaccttgcatggcaagtgactttgtaga

SEQ ID NO: 10299 - DNA, 122 bp, Homo sapiens
  misc_feature (61)..(62): /note="This region represents a CpG dinucleotide"
  misc_feature (61)..(61): /note="Nucleotide may be methylated to form 5-methylcytosine"
cccaagcacatttgctgtgctcctcctaaggtaaataacagcatccactgtgctcagccacggcttaaagcccttctagattgcatacaactcaggcagggtcattctgactcactccctca

SEQ ID NO: 10300 - DNA, 122 bp, Homo sapiens
  misc_feature (61)..(62): /note="This region represents a CpG dinucleotide"
  misc_feature (61)..(61): /note="Nucleotide may be methylated to form 5-methylcytosine"
ccaagacctgggagccttagtccatatgagtcaacctttccttgttgtgcttaaacctgacgctgactgactgtcaactgacagaacagaagcttcttcatagcacactataaaagtgctaa

SEQ ID NO: 10301 - DNA, 122 bp, Homo sapiens
  misc_feature (61)..(62): /note="This region represents a CpG dinucleotide"
  misc_feature (61)..(61): /note="Nucleotide may be methylated to form 5-methylcytosine"
tgcaactcaggcccaggatgacaaatggtgtcttaggccattgttaacacagggaggtagcgaccagttgacgtgtgatttttaaatgctcagtgcagaataaatgaaatgatgccattgtc

SEQ ID NO: 10302 - DNA, 122 bp, Homo sapiens
  misc_feature (61)..(62): /note="This region represents a CpG dinucleotide"
  misc_feature (61)..(61): /note="Nucleotide may be methylated to form 5-methylcytosine"
taggctgagcattgggttcaggtgtagtcagactaggcaacaattataaaattccccgtccgtttttcacctaatggtttagttgatcatcactgcctagctctattatttcattaggagtt

SEQ ID NO: 10303 - DNA, 122 bp, Homo sapiens
  misc_feature (61)..(62): /note="This region represents a CpG dinucleotide"
  misc_feature (61)..(61): /note="Nucleotide may be methylated to form 5-methylcytosine"
ttatttctggaaatcaaacaccacttgggcacttaagaacagaggtactgaggccgggtgcggtagctcaagcctgtaatcccagcactttgggaggccgaggtgggtggatcacttgagcc

SEQ ID NO: 10304 - DNA, 122 bp, Homo sapiens
  misc_feature (61)..(62): /note="This region represents a CpG dinucleotide"
  misc_feature (61)..(61): /note="Nucleotide may be methylated to form 5-methylcytosine"
tgccaagaagtcaaccatctttcccggggctggcactgccttcgcgatttgggacgatgtcgcaagagtctgccgtgcgcctccagtgcctgaacaggcagctgcaagtccgtgggcctgag

SEQ ID NO: 10305 - DNA, 122 bp, Homo sapiens
  misc_feature (61)..(62): /note="This region represents a CpG dinucleotide"
  misc_feature (61)..(61): /note="Nucleotide may be methylated to form 5-methylcytosine"
atacttgttttcgtttgaggcactttgcatttattatctcctttaatcctcagggccatgcggtatcatgtctctcgaagagataagaacacagagatgcttgtctgtgggtctcttacttc

SEQ ID NO: 10306 - DNA, 122 bp, Homo sapiens
  misc_feature (61)..(62): /note="This region represents a CpG dinucleotide"
  misc_feature (61)..(61): /note="Nucleotide may be methylated to form 5-methylcytosine"
attaaagctgagtgttttcttggaaaatgtcctgcatgtgttgaaattaaaagcctttggcgaaggctttaagctcacagtgaattctggtgtgttacctgcacctgccagcagccttgctt

SEQ ID NO: 10307 - DNA, 122 bp, Homo sapiens
  misc_feature (61)..(62): /note="This region represents a CpG dinucleotide"
  misc_feature (61)..(61): /note="Nucleotide may be methylated to form 5-methylcytosine"
tgcagccaggaatcaagacaacacaaatgagttctggaagtgattcatgctaggactgtacgctaaggcaatggggcagaaagcctgggagtgcagtttttttgtttttgttttttgttttt

SEQ ID NO: 10308 - DNA, 122 bp, Homo sapiens
  misc_feature (61)..(62): /note="This region represents a CpG dinucleotide"
  misc_feature (61)..(61): /note="Nucleotide may be methylated to form 5-methylcytosine"
aacagaaaatcccattggaaatttatcttcaggtgaaaatgccgccttcctgcttttaagcgaactgcctgtgatatcatgagctcaggctgcagaggctcagccaaacaaagagaggaaag

SEQ ID NO: 10309 - DNA, 122 bp, Homo sapiens
  misc_feature (61)..(62): /note="This region represents a CpG dinucleotide"
  misc_feature (61)..(61): /note="Nucleotide may be methylated to form 5-methylcytosine"
tcattaaaacctctgagctcctgggttggtgctcatcttctagcagtcaaaccagattgccgcttaggattctcaacttggatataaactaaatctcaagggtgttggttccaaacattgga

SEQ ID NO: 10310 - DNA, 122 bp, Homo sapiens
  misc_feature (61)..(62): /note="This region represents a CpG dinucleotide"
  misc_feature (61)..(61): /note="Nucleotide may be methylated to form 5-methylcytosine"
actctagttgtagggatgctattcaaacctatactcgaatactcatctacctggtgttttcgtgcctgctgttcctggatttgctgtgcatggtgtgacaaggtgacatgatgactatgccc

SEQ ID NO: 10311 - DNA, 122 bp, Homo sapiens
  misc_feature (61)..(62): /note="This region represents a CpG dinucleotide"
  misc_feature (61)..(61): /note="Nucleotide may be methylated to form 5-methylcytosine"
actgagtctccttaggtaaatcacagaattctctgactcatctagaagtgatgataatgacggttacttgatagagttgttcataaggatctaatgaatgcggaataaatgcatatctctgg

SEQ ID NO: 10312 - DNA, 122 bp, Homo sapiens
  misc_feature (61)..(62): /note="This region represents a CpG dinucleotide"
  misc_feature (61)..(61): /note="Nucleotide may be methylated to form 5-methylcytosine"
aagcaccactagccctgggtggtggttcctcttgggtcttcagctgcacctcaggttgcacgtgtgtgggatgcaggcccaacttcagacaggcgattctggcagtcacataggactctctc

SEQ ID NO: 10313 - DNA, 122 bp, Homo sapiens
  misc_feature (61)..(62): /note="This region represents a CpG dinucleotide"
  misc_feature (61)..(61): /note="Nucleotide may be methylated to form 5-methylcytosine"
tttggtgattccattggttagtcactattagtcacttgctgtttatgaagcgctgtgtgtcgtgaagggggagtggtccctgcattaagccatgacttacatcttactgcagatgctgttgt

SEQ ID NO: 10314 - DNA, 122 bp, Homo sapiens
  misc_feature (61)..(62): /note="This region represents a CpG dinucleotide"
  misc_feature (61)..(61): /note="Nucleotide may be methylated to form 5-methylcytosine"
attcttctggaaaagcctccatatgccccaccagactgtcagaggactccagatacagaacggtctcgatgccctgactcagcaagagtgactgagtcaaatcctgactgtctcatatacca

SEQ ID NO: 10315 - DNA, 122 bp, Homo sapiens
  misc_feature (61)..(62): /note="This region represents a CpG dinucleotide"
  misc_feature (61)..(61): /note="Nucleotide may be methylated to form 5-methylcytosine"
tttacctctctggggtgattcagagtttcttgaaaatgctgttccactcttacccaattccgtgtgttgttcttagaaagcctgaggtcagcctacattttttatcagaataaaatttgacc

SEQ ID NO: 10316 - DNA, 122 bp, Homo sapiens
  misc_feature (61)..(62): /note="This region represents a CpG dinucleotide"
  misc_feature (61)..(61): /note="Nucleotide may be methylated to form 5-methylcytosine"
atgggcccctcccaagagcctgaacctgaatacttcttataaaaaggttctctggctggacgctgctcaatccactgcctagcaggtggcccattccagttggagaacgtagtgagtctttc

SEQ ID NO: 10317 - DNA, 122 bp, Homo sapiens
  misc_feature (61)..(62): /note="This region represents a CpG dinucleotide"
  misc_feature (61)..(61): /note="Nucleotide may be methylated to form 5-methylcytosine"
attttcctatcattattcccgtactaaggaggcacagttgccaccataaacagcacttaccggtggcatttacagcttctcaggtgatgtggcattctgaccagatgccagaaggcttgtga

SEQ ID NO: 10318 - DNA, 122 bp, Homo sapiens
  misc_feature (61)..(62): /note="This region represents a CpG dinucleotide"
  misc_feature (61)..(61): /note="Nucleotide may be methylated to form 5-methylcytosine"
cagctaccatctaaccaggcaactgagggaaaagcacaaggacttgtcattactgagtggcggttgcttgaactgaagactgggcaaggctgaaaacctggggcttgatagagcctgtaggg

SEQ ID NO: 10319 - DNA, 122 bp, Homo sapiens
  misc_feature (61)..(62): /note="This region represents a CpG dinucleotide"
  misc_feature (61)..(61): /note="Nucleotide may be methylated to form 5-methylcytosine"
gagactctctgttgattcattcatgagacagacacttgctgggtgcctcctagtgtcaggcgcagcgaggcgtgctggggaggcaaaggggcatagccgcctcctggcgtagtggccggggg

SEQ ID NO: 10320 - DNA, 122 bp, Homo sapiens
  misc_feature (61)..(62): /note="This region represents a CpG dinucleotide"
  misc_feature (61)..(61): /note="Nucleotide may be methylated to form 5-methylcytosine"
tggcaggttcctgcccttccttgttgtcccggttcatcttctgctccttgagcagggagccgggcaggttggaggcgtacttaaagccagggccacgcttttgcttgtaggccaaaaagaga

SEQ ID NO: 10321 - DNA, 122 bp, Homo sapiens
  misc_feature (61)..(62): /note="This region represents a CpG dinucleotide"
  misc_feature (61)..(61): /note="Nucleotide may be methylated to form 5-methylcytosine"
gcctgctgttaagccctcagagatcttctgaggtcagtcctggaacgcctcagtaccccgcggtccaacactctggcccatcctagacggatgagtctcatctggtgccaccaccatgattc

SEQ ID NO: 10322 - DNA, 122 bp, Homo sapiens
  misc_feature (61)..(62): /note="This region represents a CpG dinucleotide"
  misc_feature (61)..(61): /note="Nucleotide may be methylated to form 5-methylcytosine"
tgaagtgcacaaactgctggttcagcttgataaacttgaggtgctggtcaaagaactgcccgtggctcacacccttgcggccaaaggtcatcgttcttgagatctcagggcgtatgcaggcc

SEQ ID NO: 10323 - DNA, 122 bp, Homo sapiens
  misc_feature (61)..(62): /note="This region represents a CpG dinucleotide"
  misc_feature (61)..(61): /note="Nucleotide may be methylated to form 5-methylcytosine"
tgagagcttcaggtgaggaggctgagggaacagtgagagcccaaaggacatcctaggtcacgcgaaggagtctacactttatctgaagtgccaacgtaagtctttgaagaattccaagcaag

SEQ ID NO: 10324 - DNA, 122 bp, Homo sapiens
  misc_feature (61)..(62): /note="This region represents a CpG dinucleotide"
  misc_feature (61)..(61): /note="Nucleotide may be methylated to form 5-methylcytosine"
aagatttaatatccttaccacccttttacaaatctataataaagaaggcatgcaacctatcgttaaaaatgagtaatataaaaatgagtaacataagagttgatcctttcatagttcatatg

SEQ ID NO: 10325 - DNA, 122 bp, Homo sapiens
  misc_feature (61)..(62): /note="This region represents a CpG dinucleotide"
  misc_feature (61)..(61): /note="Nucleotide may be methylated to form 5-methylcytosine"
tgctccaaaatgtaatacattttgagcacccacatgatgtcgcaattagaaaatcccacacgtgacctcatatgctgggttgcagtcaaactgcagtcacacaacacagttcattcagcaac

SEQ ID NO: 10326 - DNA, 122 bp, Homo sapiens
  misc_feature (61)..(62): /note="This region represents a CpG dinucleotide"
  misc_feature (61)..(61): /note="Nucleotide may be methylated to form 5-methylcytosine"
gacccagcatgtaaagctgcagcttggctaagacatagtgtttctgaacagtttcaaatacgccagtcatatcatgttgaattcttggatggccagtcacccagcgtgtttcccttggaatg

SEQ ID NO: 10327 - DNA, 122 bp, Homo sapiens
  misc_feature (61)..(62): /note="This region represents a CpG dinucleotide"
  misc_feature (61)..(61): /note="Nucleotide may be methylated to form 5-methylcytosine"
agcttgagcctaggatggatgaaatctgtaatccacttgaaaatgtgcactgtcagaatacgattaggcaagattgatgaatattctacttacttacttggaaaccaattctctacctttgt

SEQ ID NO: 10328 - DNA, 122 bp, Homo sapiens
  misc_feature (61)..(62): /note="This region represents a CpG dinucleotide"
  misc_feature (61)..(61): /note="Nucleotide may be methylated to form 5-methylcytosine"
gctgcagagaggaaggagatcctgactggcaccaagtgcatctgggtgaaggccgcccggcggcgctcgcgggccctgggaaccgaggggcgacacctgctggcacccgcgacagagcgcag

SEQ ID NO: 10329 - DNA, 122 bp, Homo sapiens
  misc_feature (61)..(62): /note="This region represents a CpG dinucleotide"
  misc_feature (61)..(61): /note="Nucleotide may be methylated to form 5-methylcytosine"
aaaacatgaagctatacatacagtttctaaatttgttttgtataatgtcttcttcctccacgggtgtttcttcttgaagacggaattttgaaaagcttctgattcttctgttgcatcatcct

SEQ ID NO: 10330 - DNA, 122 bp, Homo sapiens
  misc_feature (61)..(62): /note="This region represents a CpG dinucleotide"
  misc_feature (61)..(61): /note="Nucleotide may be methylated to form 5-methylcytosine"
cctcccaagaggaacatgctcctcatgctacattttctgatgaccaaacattaactcatccgcctaaatctcttcaatgactaaaaagttcctcgcatcatcatgaaatagtagcttgaaat

SEQ ID NO: 10331 - DNA, 122 bp, Homo sapiens
  misc_feature (61)..(62): /note="This region represents a CpG dinucleotide"
  misc_feature (61)..(61): /note="Nucleotide may be methylated to form 5-methylcytosine"
tctagagctgggaagtagaagatcaaggccccagcaggggcccattcctcatagatgatgcgtcctctatgttgctgcatcctcccatgatgaaagggcaaaagaggtgaacaactctctca

SEQ ID NO: 10332 - DNA, 122 bp, Homo sapiens
  misc_feature (61)..(62): /note="This region represents a CpG dinucleotide"
  misc_feature (61)..(61): /note="Nucleotide may be methylated to form 5-methylcytosine"
cttatctcactacatgaaccactgctgtgggatttggggtctggttagggaagattaaagcggtgggtggtgcagcattctttgcttaaaacctaaaatacaactccttctgcattaaatac

SEQ ID NO: 10333 - DNA, 122 bp, Homo sapiens
  misc_feature (61)..(62): /note="This region represents a CpG dinucleotide"
  misc_feature (61)..(61): /note="Nucleotide may be methylated to form 5-methylcytosine"
agggccatgcccaggtgctggaatagtcatggtaaggggcacacccctgggcgtgtctgtcgtggcaggttcgcctacaaggacgaatatgagaagttcaagctctacctgaccatcatcct

SEQ ID NO: 10334 - DNA, 122 bp, Homo sapiens
  misc_feature (61)..(62): /note="This region represents a CpG dinucleotide"
  misc_feature (61)..(61): /note="Nucleotide may be methylated to form 5-methylcytosine"
cttcctttttctcccttcagtgaggcaggccctgagttaagtcagctgtcaaaagcagaacgtagaaaacccaagaaatagtccttgaccaggcacgtatagttggaaacacctgttctttg

SEQ ID NO: 10335 - DNA, 122 bp, Homo sapiens
  misc_feature (61)..(62): /note="This region represents a CpG dinucleotide"
  misc_feature (61)..(61): /note="Nucleotide may be methylated to form 5-methylcytosine"
catccagttcatagatgagatcagtgtcaacgggtacaaatccagcagggtgactccatgcgtgtgtgtgtatatgtgaataacacaaagcatgtcatgaaatagatgcattaaatctgaag

SEQ ID NO: 10336 - DNA, 122 bp, Homo sapiens
  misc_feature (61)..(62): /note="This region represents a CpG dinucleotide"
  misc_feature (61)..(61): /note="Nucleotide may be methylated to form 5-methylcytosine"
aatgcaatttcccccatctagaaatgtaaccctcagccagttgccttgaaagctggttaccgtggagatgattatcagtattatgatgacctatttagaagaatttctgcatcaccagaaaa

SEQ ID NO: 10337 - DNA, 122 bp, Homo sapiens
  misc_feature (61)..(62): /note="This region represents a CpG dinucleotide"
  misc_feature (61)..(61): /note="Nucleotide may be methylated to form 5-methylcytosine"
gaaagtgcttaaagctcaaaacagcccatttccttgcaacttccccaataaagtgcttctcggtcttaccagtctcagattgcaccatcatttacctagtagctcaaaacaaaaatctgcag

SEQ ID NO: 10338 - DNA, 122 bp, Homo sapiens
  misc_feature (61)..(62): /note="This region represents a CpG dinucleotide"
  misc_feature (61)..(61): /note="Nucleotide may be methylated to form 5-methylcytosine"
aatgcgttggagaatcaccttaattttttccaggtaattgggtaaaggcctcagagaggtcgtggcatttgaggatgaataaaatgctgctagctggggaaaggttgttaggaacaggaaag

SEQ ID NO: 10339 - DNA, 122 bp, Homo sapiens
  misc_feature (61)..(62): /note="This region represents a CpG dinucleotide"
  misc_feature (61)..(61): /note="Nucleotide may be methylated to form 5-methylcytosine"
atgaaagagtataactattgacatgctccattacaaactttgttgtgtcaccagttcttccgtatcttgatccaagatgacatcttgtctggccatggaggtggttaagactaaatgaaaat

SEQ ID NO: 10340 - DNA, 122 bp, Homo sapiens
  misc_feature (61)..(62): /note="This region represents a CpG dinucleotide"
  misc_feature (61)..(61): /note="Nucleotide may be methylated to form 5-methylcytosine"
cttagggcaattactcaacctctctgtgtcacagattctacagcataaaaccagtaataacgctcacttcacagggctgcaaggagaattaaacaaggtaaaccatgtgaaacacttaggat

SEQ ID NO: 10341 - DNA, 122 bp, Homo sapiens
  misc_feature (61)..(62): /note="This region represents a CpG dinucleotide"
  misc_feature (61)..(61): /note="Nucleotide may be methylated to form 5-methylcytosine"
ctgcagagtagctgggactataggactgtgctaccacacccagctcattttctaatttttcgtagagatgaggtttcactgtgttgcccaggctggtcttgaacttctggccttacgggatc

SEQ ID NO: 10342 - DNA, 122 bp, Homo sapiens
  misc_feature (61)..(62): /note="This region represents a CpG dinucleotide"
  misc_feature (61)..(61): /note="Nucleotide may be methylated to form 5-methylcytosine"
tctgctgaaattgacttcctctattgaaccctgagcaaaataaacttccctagcaggtttcgtgtaattgctgtacattttcgaggcaacgtcctatatgaccgacatttaccaaaatggat

SEQ ID NO: 10343 - DNA, 122 bp, Homo sapiens
  misc_feature (61)..(62): /note="This region represents a CpG dinucleotide"
  misc_feature (61)..(61): /note="Nucleotide may be methylated to form 5-methylcytosine"
tcctaccctagagaaacccattagacctttaccaaaatcaacttttcttctgagtcagaccgaattcttaattgtaggtgatagaccaaaagggaaagatgactcaatgtaaataatcgttg

SEQ ID NO: 10344 - DNA, 122 bp, Homo sapiens
  misc_feature (61)..(62): /note="This region represents a CpG dinucleotide"
  misc_feature (61)..(61): /note="Nucleotide may be methylated to form 5-methylcytosine"
taggctttgtcaaccagagaagcttgttagagactccatgcctagggcttttactggtcacgtaggcagatctacctgggacattccaaaattccagattcccagaaggaaagcaggtattc

SEQ ID NO: 10345 - DNA, 122 bp, Homo sapiens
  misc_feature (61)..(62): /note="This region represents a CpG dinucleotide"
  misc_feature (61)..(61): /note="Nucleotide may be methylated to form 5-methylcytosine"
cagctcagtgctctttctactgctgcctcactgccagattttcagtgtccttgtttttcacggaacatggtgacatagggtggtggttgagggcattatgatgcagtcagcatgcattggtg

SEQ ID NO: 10346 - DNA, 122 bp, Homo sapiens
  misc_feature (61)..(62): /note="This region represents a CpG dinucleotide"
  misc_feature (61)..(61): /note="Nucleotide may be methylated to form 5-methylcytosine"
acaattacctgtgataagagccatgtgtgagagttccacctgagtggagactaaatggcacgctgctggagtactgagcagagaggaatcacatgactgtgagctcagatcatttctgggta

SEQ ID NO: 10347 - DNA, 122 bp, Homo sapiens
  misc_feature (61)..(62): /note="This region represents a CpG dinucleotide"
  misc_feature (61)..(61): /note="Nucleotide may be methylated to form 5-methylcytosine"
acaatggtactcaccactgacttaagcaatgcagagcacataagcactaagagactccttcggcagggcgtggtggctcctgcctgtaatcccagcactttgggagggtgaggtgggtggat

SEQ ID NO: 10348 - DNA, 122 bp, Homo sapiens
  misc_feature (61)..(62): /note="This region represents a CpG dinucleotide"
  misc_feature (61)..(61): /note="Nucleotide may be methylated to form 5-methylcytosine"
ctgtgctgtgatggggcatggatgctttctcagaggtactttccccctaagctttaggcacgtctgaccatttcttctgctttggtccagtgctttcctcatgatttagactctggatgaag

SEQ ID NO: 10349 - DNA, 122 bp, Homo sapiens
  misc_feature (61)..(62): /note="This region represents a CpG dinucleotide"
  misc_feature (61)..(61): /note="Nucleotide may be methylated to form 5-methylcytosine"
agatgagactgttctgggaacctgctttgctgcttgagtagctgatcgagtcattctcaacgacgtgggcattacaggctgcacaactgtgggaaaaaaaaataactacatcaaatgtccct

SEQ ID NO: 10350 - DNA, 122 bp, Homo sapiens
  misc_feature (61)..(62): /note="This region represents a CpG dinucleotide"
  misc_feature (61)..(61): /note="Nucleotide may be methylated to form 5-methylcytosine"
gaatgtcacctattgaagaggtgccaagcagtttgccccgctctggaattacgaagatcacgtgttccttgcatacatctggcagcagtgggaaaacctcagagttcctgtgggatgtctga

SEQ ID NO: 10351 - DNA, 122 bp, Homo sapiens
  misc_feature (61)..(62): /note="This region represents a CpG dinucleotide"
  misc_feature (61)..(61): /note="Nucleotide may be methylated to form 5-methylcytosine"
aaaagcaacttcataaagaaatgaggcatgccagggagagccagcaaccatggctggtgccgtcctgtctgcccatcctatcagtgatgttgcaaatgttttgatatttcagcactgagctg

SEQ ID NO: 10352 - DNA, 122 bp, Homo sapiens
  misc_feature (61)..(62): /note="This region represents a CpG dinucleotide"
  misc_feature (61)..(61): /note="Nucleotide may be methylated to form 5-methylcytosine"
cagctctttggtgccagctgtttcatcaccagactttggctcccgctttggggagcgcctcgcttcacggacaggaagcacagcaggtttatccagatgaactgagaaggtcagattagggc

SEQ ID NO: 10353 - DNA, 122 bp, Homo sapiens
  misc_feature (61)..(62): /note="This region represents a CpG dinucleotide"
  misc_feature (61)..(61): /note="Nucleotide may be methylated to form 5-methylcytosine"
ctatatctttctcttgttctctctctgtttctctggagaaccctgactaataatatactacgtaagggagattagaaagtatttaaggagctccaccaaaaggaagctgctccctgataaga

SEQ ID NO: 10354 - DNA, 122 bp, Homo sapiens
  misc_feature (61)..(62): /note="This region represents a CpG dinucleotide"
  misc_feature (61)..(61): /note="Nucleotide may be methylated to form 5-methylcytosine"
caaaggcacagagctaaggcttcaggcttcaatactgtcatttactgaaacaaggaaagacgagtgtaggtaaagccccagttacaacaagatggccaggaaaagcttcttaaatgcttggg

SEQ ID NO: 10355 - DNA, 122 bp, Homo sapiens
  misc_feature (61)..(62): /note="This region represents a CpG dinucleotide"
  misc_feature (61)..(61): /note="Nucleotide may be methylated to form 5-methylcytosine"
actaagtactccctcccggtggagacagttgattctgatcccggtggagacagttgattccgtctggtgaggtgaaatgacaacacagtgactcctccctcttctaccacaggcttaccaaa

SEQ ID NO: 10356 - DNA, 122 bp, Homo sapiens
  misc_feature (61)..(62): /note="This region represents a CpG dinucleotide"
  misc_feature (61)..(61): /note="Nucleotide may be methylated to form 5-methylcytosine"
gcgaagcccggccactgtcaccatgggctccagcctcgcctctctgggcctggtggtgagcggcttcagcaacaggtttccggtccccgcagagggtcccactctgaactcccgatttacag

SEQ ID NO: 10357 - DNA, 122 bp, Homo sapiens
  misc_feature (61)..(62): /note="This region represents a CpG dinucleotide"
  misc_feature (61)..(61): /note="Nucleotide may be methylated to form 5-methylcytosine"
caacttcctcatcaccaacgatgaggcatacgctgaggagtttggcaacgagacgtggggcgtaacaaaggtgaggcctggtcctggtcctgatgtcgggggcgggcagggctggcaggggg

SEQ ID NO: 10358 - DNA, 122 bp, Homo sapiens
  misc_feature (61)..(62): /note="This region represents a CpG dinucleotide"
  misc_feature (61)..(61): /note="Nucleotide may be methylated to form 5-methylcytosine"
caaaacagtgtatgatgaaatcacctcctaattccatgttcattaattcactcattcatgcgttcaagcactccatgtttgtggagtgcttactatgtgccagccacttgactagtcgtgga

SEQ ID NO: 10359 - DNA, 122 bp, Homo sapiens
  misc_feature (61)..(62): /note="This region represents a CpG dinucleotide"
  misc_feature (61)..(61): /note="Nucleotide may be methylated to form 5-methylcytosine"
cccctcataaccctcatccaacctaccagcaatttttttagcatgaatcttcaaaatacacgctgaatcctaccacttctcaattctatacctttgtccaaactttcctgactcttgacact

SEQ ID NO: 10360 - DNA, 122 bp, Homo sapiens
  misc_feature (61)..(62): /note="This region represents a CpG dinucleotide"
  misc_feature (61)..(61): /note="Nucleotide may be methylated to form 5-methylcytosine"
acaaagcaggttgtaggcaaatgctacctattcaatgaaggccattttttctgacctcaccgtagctgctgccttgactcaccagagaattacagtgagtacaggtgaaaggaaagcaggaa

SEQ ID NO: 10361 - DNA, 122 bp, Homo sapiens
  misc_feature (61)..(62): /note="This region represents a CpG dinucleotide"
  misc_feature (61)..(61): /note="Nucleotide may be methylated to form 5-methylcytosine"
cccgtttgcctggggaagctggcagtcactgggagcagctctgctgttctgcctcctttgcgagcctcaggtggccccagggccattgtgtgtgagcaaaggcaccctgtccagtctaacct

SEQ ID NO: 10362 - DNA, 122 bp, Homo sapiens
  misc_feature (61)..(62): /note="This region represents a CpG dinucleotide"
  misc_feature (61)..(61): /note="Nucleotide may be methylated to form 5-methylcytosine"
agccctgcccagttccatagtgcatctgtgtgactctgttcaggattttgcacccataggcgcagaatctcacgtgtgtgcacatgtgcttgtgaccaggcaaatcggttgcatctttaatg

SEQ ID NO: 10363 - DNA, 122 bp, Homo sapiens
  misc_feature (61)..(62): /note="This region represents a CpG dinucleotide"
  misc_feature (61)..(61): /note="Nucleotide may be methylated to form 5-methylcytosine"
tgctggcactcaccaggaagcagagttcaccctggcggaagaggtttgagccctctccagcgcaggcagctgtgttcaggacctctggagaatgcagtcatttgtttacacagctaaatcaa

SEQ ID NO: 10364 - DNA, 122 bp, Homo sapiens
  misc_feature (61)..(62): /note="This region represents a CpG dinucleotide"
  misc_feature (61)..(61): /note="Nucleotide may be methylated to form 5-methylcytosine"
aacttcctgccttaaaccaccaccatacacacgtcagctaaactctaattttaggctgggcgcagtagctaatgcttgtaatcccaggactttgggaggctgaggcggctcgcaaggctagg

SEQ ID NO: 10365 - DNA, 122 bp, Homo sapiens
  misc_feature (61)..(62): /note="This region represents a CpG dinucleotide"
  misc_feature (61)..(61): /note="Nucleotide may be methylated to form 5-methylcytosine"
acttagcctgggtcagttgctaactgaggtctgctctatgaccccatttcctggcctggccgctgctcagatcctggcctctaagggaacatttaaattcttaatcctaagtctccctgcct

SEQ ID NO: 10366 - DNA, 122 bp, Homo sapiens
  misc_feature (61)..(62): /note="This region represents a CpG dinucleotide"
  misc_feature (61)..(61): /note="Nucleotide may be methylated to form 5-methylcytosine"
ttctacattgaatgtccaacctttgtctctttacctagcaacatcagatgcatcaaagctcgtttcctccctgagtcctcagagactcaggcagtacctgttttcacagtacagagcacttt

SEQ ID NO: 10367 - DNA, 122 bp, Homo sapiens
  misc_feature (61)..(62): /note="This region represents a CpG dinucleotide"
  misc_feature (61)..(61): /note="Nucleotide may be methylated to form 5-methylcytosine"
gaatgggaatagatattttaggaaatgcttcataggtagcgatgcctgagctgggtcttacgaaagtatggatatttgccagggagacaagaagtaaaggtagcttacagaaagagagaagg

SEQ ID NO: 10368 - DNA, 122 bp, Homo sapiens
  misc_feature (61)..(62): /note="This region represents a CpG dinucleotide"
  misc_feature (61)..(61): /note="Nucleotide may be methylated to form 5-methylcytosine"
accttctcagctgtccagtatctgcagagcagcagtacatgctggagtggttcgaaatcacggtggttatgttgatgtaatgcctgtggacaaaagaaagacctacattgcttcttttcaga

SEQ ID NO: 10369 - DNA, 122 bp, Homo sapiens
  misc_feature (61)..(62): /note="This region represents a CpG dinucleotide"
  misc_feature (61)..(61): /note="Nucleotide may be methylated to form 5-methylcytosine"
aagacactgcctagccctctcactcagcagtgagtcgtagatgattcctccagatcttgacgaggcccacaggcccttgtttaagaacgtcgcttgctgctttgctgcttctatggggcaca

SEQ ID NO: 10370 - DNA, 122 bp, Homo sapiens
  misc_feature (61)..(62): /note="This region represents a CpG dinucleotide"
  misc_feature (61)..(61): /note="Nucleotide may be methylated to form 5-methylcytosine"
tgtaagtcgtttttataaaaatgaatatgcgatcactgccctaactctcgtttctttaaacggatgccaagagcattcaagggagagcaatgccaaatttacattcagctttaacagtttgt

SEQ ID NO: 10371 - DNA, 122 bp, Homo sapiens
  misc_feature (61)..(62): /note="This region represents a CpG dinucleotide"
  misc_feature (61)..(61): /note="Nucleotide may be methylated to form 5-methylcytosine"
ttcataaagtaaatatctttttcattgctctccagcacatgctaagaatttagcttccaccgccttaagtaaacactctgcgataccagtcctaaaaaagtcactgtggcaggggctgtggt

SEQ ID NO: 10372 - DNA, 122 bp, Homo sapiens
  misc_feature (61)..(62): /note="This region represents a CpG dinucleotide"
  misc_feature (61)..(61): /note="Nucleotide may be methylated to form 5-methylcytosine"
tgtggctctgctccttccacaagcacttggggccaggcccatccacctgccatcaggctccgcttcctgaggttacaaatcagagccacccaggctctgaaatgaaatgtgcatttagggcc

SEQ ID NO: 10373 - DNA, 122 bp, Homo sapiens
  misc_feature (61)..(62): /note="This region represents a CpG dinucleotide"
  misc_feature (61)..(61): /note="Nucleotide may be methylated to form 5-methylcytosine"
ccaggcatggtgctgggcatggtagagctacagataagaaccagctgctgcccttgatcacgtagtctggtggaggagacagctctgaggaagaatgatgcttatctgactcagtgtcactt

SEQ ID NO: 10374 - DNA, 122 bp, Homo sapiens
  misc_feature (61)..(62): /note="This region represents a CpG dinucleotide"
  misc_feature (61)..(61): /note="Nucleotide may be methylated to form 5-methylcytosine"
aaactgtcactagtcagctggctctttttcctatgaaatctatcagtacctttctccatccgttgttctcaatatgaccacagagcctgagtataccaagaaaaccaatattcgcattacag

SEQ ID NO: 10375 - DNA, 122 bp, Homo sapiens
  misc_feature (61)..(62): /note="This region represents a CpG dinucleotide"
  misc_feature (61)..(61): /note="Nucleotide may be methylated to form 5-methylcytosine"
tgtgtgttttcatacaagctggcacatatctcttctaaagccctgctgtcattgtagctgcgtctttacaaacattttttttttaaatttttataaagtcaaggtctcactatattgcccag

SEQ ID NO: 10376 - DNA, 122 bp, Homo sapiens
  misc_feature (61)..(62): /note="This region represents a CpG dinucleotide"
  misc_feature (61)..(61): /note="Nucleotide may be methylated to form 5-methylcytosine"
acactatggtaatattggaagacacgccacagtgcaagtgtcagtcatgtgatgtgtatgcgatcattagaagtgacaggaggaaatgccaggctttgacttctgcacctccgcccaggcaa

SEQ ID NO: 10377 - DNA, 122 bp, Homo sapiens
  misc_feature (61)..(62): /note="This region represents a CpG dinucleotide"
  misc_feature (61)..(61): /note="Nucleotide may be methylated to form 5-methylcytosine"
ctcggcagtcacccgccagcgttcctgtagggcccagggcaggactgagagcgtggttcccgccctgaggatcacgcctggccactccctgagaagctgcatgaacccaccagtgtctccca

SEQ ID NO: 10378 - DNA, 122 bp, Homo sapiens
  misc_feature (61)..(62): /note="This region represents a CpG dinucleotide"
  misc_feature (61)..(61): /note="Nucleotide may be methylated to form 5-methylcytosine"
ctgtctctctcgtgcatatgtgtctgtgggtctccctgtgggttctccccagcctctctccgcgccagctcttttaagcatggtgagcctctgcgattgattggctgatctctaagccactc

SEQ ID NO: 10379 - DNA, 122 bp, Homo sapiens
  misc_feature (61)..(62): /note="This region represents a CpG dinucleotide"
  misc_feature (61)..(61): /note="Nucleotide may be methylated to form 5-methylcytosine"
agccattgactcatgtacaggacacattaagcctcatctctgctaacagatttacttacccgatgataacaactttctgcagcagtcagagtgagcatttagggcagctaaatgtaaaggga

SEQ ID NO: 10380 - DNA, 122 bp, Homo sapiens
  misc_feature (61)..(62): /note="This region represents a CpG dinucleotide"
  misc_feature (61)..(61): /note="Nucleotide may be methylated to form 5-methylcytosine"
acaatgaatcataacccatacctcacactgcatattcaaaatgaattgaaaatcaccgggcgtggtggatcatgcctgtaattccagcactttaggaggccgaggctcaggtggatcaactg

SEQ ID NO: 10381 - DNA, 122 bp, Homo sapiens
  misc_feature (61)..(62): /note="This region represents a CpG dinucleotide"
  misc_feature (61)..(61): /note="Nucleotide may be methylated to form 5-methylcytosine"
atgacagcctgagccacacacctatcgactgagacttagaagtaagagccaaagcctacccggaacctcccagtctcacaccaccttttccaattcagcttttcccagatttctccattggg

SEQ ID NO: 10382 - DNA, 122 bp, Homo sapiens
  misc_feature (61)..(62): /note="This region represents a CpG dinucleotide"
  misc_feature (61)..(61): /note="Nucleotide may be methylated to form 5-methylcytosine"
tatcgaatgatgttaaaattacatgaaagacatattctgtgtttaaacaaaatccccaagcgtctcctccctgcttctccacaaacaaaaattattttttgacattttctttaaggttttat

SEQ ID NO: 10383 - DNA, 122 bp, Homo sapiens
  misc_feature (61)..(62): /note="This region represents a CpG dinucleotide"
  misc_feature (61)..(61): /note="Nucleotide may be methylated to form 5-methylcytosine"
ggtggctaccatataggactgtgcagacctaggagttcaagtgaaagcaaacagaaaatacgggcagcatcaacatttgctgtagcaaagcataaggggattatgtttaagaagggatcaaa

SEQ ID NO: 10384 - DNA, 122 bp, Homo sapiens
  misc_feature (61)..(62): /note="This region represents a CpG dinucleotide"
  misc_feature (61)..(61): /note="Nucleotide may be methylated to form 5-methylcytosine"
tacgtggcaggggattggagtttcctttcatgaggattagacatgaaatgaaatggcgttcggctgcttagagggctgactcaagtcagttcctgtttggtatgtgtaacattaacagatgt

SEQ ID NO: 10385 - DNA, 122 bp, Homo sapiens
  misc_feature (61)..(62): /note="This region represents a CpG dinucleotide"
  misc_feature (61)..(61): /note="Nucleotide may be methylated to form 5-methylcytosine"
tcaagacttttggcccaaaatttcagtggggagtgtggcctacatgccagtcttctcagccgtagcctcccacaagggcagggtgagtgacagcacaccaatctcctggcacagtaataaca

SEQ ID NO: 10386 - DNA, 122 bp, Homo sapiens
  misc_feature (61)..(62): /note="This region represents a CpG dinucleotide"
  misc_feature (61)..(61): /note="Nucleotide may be methylated to form 5-methylcytosine"
ttttctgaaagccttgatttctgtagacagaactatggtttttggcatgttgggtcaagacgtgtttctataggaaatgcttgcacgtggcactggcttggtgagtcaagcttcctgagctt

SEQ ID NO: 10387 - DNA, 122 bp, Homo sapiens
  misc_feature (61)..(62): /note="This region represents a CpG dinucleotide"
  misc_feature (61)..(61): /note="Nucleotide may be methylated to form 5-methylcytosine"
cttaacaagattaaatgagaatccacccagggtattttgtgcagctctcagcagttgatacgtgttgatacaatgctatgtattgtcagggttgtgataagttgattaatattattaatata

SEQ ID NO: 10388 - DNA, 122 bp, Homo sapiens
  misc_feature (61)..(62): /note="This region represents a CpG dinucleotide"
  misc_feature (61)..(61): /note="Nucleotide may be methylated to form 5-methylcytosine"
caaatgatctacccacctcagcctcccactgctgggattacaggcgtgagccactgtgcccggccatgttctacatacttctgtggttccaagcatatctccagctccaggtgcactttagg

SEQ ID NO: 10389 - DNA, 122 bp, Homo sapiens
  misc_feature (61)..(62): /note="This region represents a CpG dinucleotide"
  misc_feature (61)..(61): /note="Nucleotide may be methylated to form 5-methylcytosine"
ccttttaaatgtacctgcttcttgaaaagattatttcttcagtcttttcccagagagtgtcgacacaggtgtgatgtaattaagagtcaggagagtaaggagagtaacttcgaggtctggag

SEQ ID NO: 10390 - DNA, 122 bp, Homo sapiens
  misc_feature (61)..(62): /note="This region represents a CpG dinucleotide"
  misc_feature (61)..(61): /note="Nucleotide may be methylated to form 5-methylcytosine"
tcatgcttggcccatggtgtttacccttggctggagccctgattctcattaaactaattacgggcagagtatgaggactacattcactcagagatcagggcacaaagcattgcaattttatg

SEQ ID NO: 10391 - DNA, 122 bp, Homo sapiens
  misc_feature (61)..(62): /note="This region represents a CpG dinucleotide"
  misc_feature (61)..(61): /note="Nucleotide may be methylated to form 5-methylcytosine"
ggtgtcaccgcccgtttgctgtgaaatcaaatggcgcccttccttttcccgggacttcggcgtcaccgtccagctggcgtcggggcagcaccccgggatctggcgtggcgcatgcgccccga

SEQ ID NO: 10392 - DNA, 122 bp, Homo sapiens
  misc_feature (61)..(62): /note="This region represents a CpG dinucleotide"
  misc_feature (61)..(61): /note="Nucleotide may be methylated to form 5-methylcytosine"
agtcactccccattttctttgaactctgtggccctaggcaacctctaatccgctgtgtctcgtctgctcctggctctttttgggtcttatctgtattgctatttgctcatctgtaacttcac

SEQ ID NO: 10393 - DNA, 122 bp, Homo sapiens
  misc_feature (61)..(62): /note="This region represents a CpG dinucleotide"
  misc_feature (61)..(61): /note="Nucleotide may be methylated to form 5-methylcytosine"
aaaatatctcctttgcctggagcatggtgaaagtctgggtgagggagtggcattgtccagcgaatgtggctgatggcatgtccatcagggaatttcaaatgggacatagtcctgaatggagg

SEQ ID NO: 10394 - DNA, 122 bp, Homo sapiens
  misc_feature (61)..(62): /note="This region represents a CpG dinucleotide"
  misc_feature (61)..(61): /note="Nucleotide may be methylated to form 5-methylcytosine"
cacacacaagcaccagaattattcagactcactaatcttgcagtgctttgcttcgtgcttcgtgggtagcagtgatcaaccaagtcctgaacttttgactgttatttgagatgaagtagcca

SEQ ID NO: 10395 - DNA, 122 bp, Homo sapiens
  misc_feature (61)..(62): /note="This region represents a CpG dinucleotide"
  misc_feature (61)..(61): /note="Nucleotide may be methylated to form 5-methylcytosine"
cattacgaaacaaaagtcatgagtcaaagaggaaattcagtctgaagttttagaatatgtcgtagtgaaatactatgtgtcagaagctgcacagtctagatgaaacagtgatctaaggaaaa

SEQ ID NO: 10396 - DNA, 122 bp, Homo sapiens
  misc_feature (61)..(62): /note="This region represents a CpG dinucleotide"
  misc_feature (61)..(61): /note="Nucleotide may be methylated to form 5-methylcytosine"
cagctctaggctttctcaggcagacatgttaatacagggctggggccatcctacggacatcgccttctgctgctagaagccaggctagagtttggtgcatttctctttagtacagaggtttg

SEQ ID NO: 10397 - DNA, 122 bp, Homo sapiens
  misc_feature (61)..(62): /note="This region represents a CpG dinucleotide"
  misc_feature (61)..(61): /note="Nucleotide may be methylated to form 5-methylcytosine"
caaagtgctgggactacagatgtgagccaataaaccacttcaaaataaacctttcttgtccgggcgaggtagctcacacttgtaatcccagcacaccaggaggccgaggtgggtggattacc

SEQ ID NO: 10398 - DNA, 122 bp, Homo sapiens
  misc_feature (61)..(62): /note="This region represents a CpG dinucleotide"
  misc_feature (61)..(61): /note="Nucleotide may be methylated to form 5-methylcytosine"
gaataagaatgcaggagagaaaaggcccaaggattaaccccagaggcacttcaacatctccggtgggaaggtaaagagcttggactgaatcctgaagtgtagttctccaagtgtagttttcc

SEQ ID NO: 10399 - DNA, 122 bp, Homo sapiens
  misc_feature (61)..(62): /note="This region represents a CpG dinucleotide"
  misc_feature (61)..(61): /note="Nucleotide may be methylated to form 5-methylcytosine"
tcaccatgcttagtcatgcgctcagctggcagggcagccatgagacgtgtgtgcgagaggcggcgatgggtggagggaaccccacacccttcctgagaagcaggggcagcctggctgcggct

SEQ ID NO: 10400 - DNA, 122 bp, Homo sapiens
  misc_feature (61)..(62): /note="This region represents a CpG dinucleotide"
  misc_feature (61)..(61): /note="Nucleotide may be methylated to form 5-methylcytosine"
gtctgatccaagagcagccaataaagcaactggctggcatctgctgaggttgcctgataccggtgctctgccctctatgaccaatattgattaagtgaattaatgagagtccctcacgtggt

SEQ ID NO: 10401 - DNA, 122 bp, Homo sapiens
  misc_feature (61)..(62): /note="This region represents a CpG dinucleotide"
  misc_feature (61)..(61): /note="Nucleotide may be methylated to form 5-methylcytosine"
ttgggcactctgtgctgcgtgctctacatgctaataagctatgtgtgaaagttgtgaatacgaattcttgatgtgaatatcagtcaggatgtgcaaatgctctgaaacactgtgcctcgggt

SEQ ID NO: 10402 - DNA, 122 bp, Homo sapiens
  misc_feature (61)..(62): /note="This region represents a CpG dinucleotide"
  misc_feature (61)..(61): /note="Nucleotide may be methylated to form 5-methylcytosine"
ttcacgtttgccatcgcctctttattcctctttactttcctccacagtccccacccctgacgtaactgtatttacttgactcctgtcatgagagagcaagctcaggggagcatagactctta

SEQ ID NO: 10403 - DNA, 122 bp, Homo sapiens
  misc_feature (61)..(62): /note="This region represents a CpG dinucleotide"
  misc_feature (61)..(61): /note="Nucleotide may be methylated to form 5-methylcytosine"
accatatccacccatgaactgttcagtcatgagtcaccacacattcccttatgcgtaaagcgtggtagtcattagtgctagtcattttttttttcttctggttctgctcctctggacatatg

SEQ ID NO: 10404 - DNA, 122 bp, Homo sapiens
  misc_feature (61)..(62): /note="This region represents a CpG dinucleotide"
  misc_feature (61)..(61): /note="Nucleotide may be methylated to form 5-methylcytosine"
ggatcaatcaagatcccataattactgggagttttaatcaactcatgccaattcagctgccgctcaatttgtgctggacttcggtgctcacaaggagggaagcggcgagggtggggtggggc

SEQ ID NO: 10405 - DNA, 122 bp, Homo sapiens
  misc_feature (61)..(62): /note="This region represents a CpG dinucleotide"
  misc_feature (61)..(61): /note="Nucleotide may be methylated to form 5-methylcytosine"
tgcccttatcagattgaggaagttcacttctattgctgctccactgagttgccctttctgcgtctgttgagataatcatgtggttttcctcccttattctattaatatggtgaattacatca

SEQ ID NO: 10406 - DNA, 122 bp, Homo sapiens
  misc_feature (61)..(62): /note="This region represents a CpG dinucleotide"
  misc_feature (61)..(61): /note="Nucleotide may be methylated to form 5-methylcytosine"
agtgagatgagtccactcatcatgcacttggatgtcttgacagtgtcaacttgctatgaacgtttctaagtgctcactttccttttctgtatttatcttgttgacccgtaacaaagagttga

SEQ ID NO: 10407 - DNA, 122 bp, Homo sapiens
  misc_feature (61)..(62): /note="This region represents a CpG dinucleotide"
  misc_feature (61)..(61): /note="Nucleotide may be methylated to form 5-methylcytosine"
ccctaacccttgactaacttcctgtatgtatgtagtcagtttactccctcagtttctactcgctcagaaactgagtggactacatacgggaaattagtcgagacaaggaagatggaacagag

SEQ ID NO: 10408 - DNA, 122 bp, Homo sapiens
  misc_feature (61)..(62): /note="This region represents a CpG dinucleotide"
  misc_feature (61)..(61): /note="Nucleotide may be methylated to form 5-methylcytosine"
aaatgcaacctggaaaacaggccttcagattcaacagatccaccctgtgcattagggtgtcgcaaacgggatcagttgctgggattaccaggaaatccaatcttctaaatcttcccccctcc

SEQ ID NO: 10409 - DNA, 122 bp, Homo sapiens
  misc_feature (61)..(62): /note="This region represents a CpG dinucleotide"
  misc_feature (61)..(61): /note="Nucleotide may be methylated to form 5-methylcytosine"
aaaaaggttttcagcagataaacagccgggacctcgggggattgtgcctcagcctaggcccggtagtcgaagacatatggacaggaaatgggcaagacacgggcctttcagagaagagagac

SEQ ID NO: 10410 - DNA, 122 bp, Homo sapiens
  misc_feature (61)..(62): /note="This region represents a CpG dinucleotide"
  misc_feature (61)..(61): /note="Nucleotide may be methylated to form 5-methylcytosine"
cagtcacatgtctttcactttaagtcaaaagctagaaatgattaagctcagtgagaaaggcgtgttgaaagctgaggtaggttaaaagctggacttcttgcaccagttagcccagtcattag

SEQ ID NO: 10411 - DNA, 122 bp, Homo sapiens
  misc_feature (61)..(62): /note="This region represents a CpG dinucleotide"
  misc_feature (61)..(61): /note="Nucleotide may be methylated to form 5-methylcytosine"
tcgaaatgccacagctgaacttgggcaagctcctaactccactaagtacagaagtggagccgtacagccatgaatgtcaggcatgttgtggggactagttgtattagttttctattgccacc

SEQ ID NO: 10412 - DNA, 122 bp, Homo sapiens
  misc_feature (61)..(62): /note="This region represents a CpG dinucleotide"
  misc_feature (61)..(61): /note="Nucleotide may be methylated to form 5-methylcytosine"
ttgaattgcaagtggggaaaatcccagcctagatgtagtataactaaggttttattagagcgctggcaaactgatgactacagcttattgaaatttgggctgggcacaatggctcacacctg

SEQ ID NO: 10413 - DNA, 122 bp, Homo sapiens
  misc_feature (61)..(62): /note="This region represents a CpG dinucleotide"
  misc_feature (61)..(61): /note="Nucleotide may be methylated to form 5-methylcytosine"
ggctcctgagtgactaacagatggggagtggagacagcgtggagacactggacaaagggacgattcacatcctgggagggacaaagcagactgtgcaagatctcactgtgtgactcagaatg

SEQ ID NO: 10414 - DNA, 122 bp, Homo sapiens
  misc_feature (61)..(62): /note="This region represents a CpG dinucleotide"
  misc_feature (61)..(61): /note="Nucleotide may be methylated to form 5-methylcytosine"
agctgcaggccggtcctggcttgttcttagtacttcacacagtgccatgcaggggtgaggcgtcagggcacaggggtgaggtgtcagggcacaggaatgaggctgtggagtgcaagggtgag

SEQ ID NO: 10415 - DNA, 122 bp, Homo sapiens
  misc_feature (61)..(62): /note="This region represents a CpG dinucleotide"
  misc_feature (61)..(61): /note="Nucleotide may be methylated to form 5-methylcytosine"
caggtgcagctgtcttaaccacttttaaagctttatcattttttaatttgaacaggcttacgcccaaactgctttcatgctaaacctatccctgacaaagtaatgctggtttatttttcaaa

SEQ ID NO: 10416 - DNA, 122 bp, Homo sapiens
  misc_feature (61)..(62): /note="This region represents a CpG dinucleotide"
  misc_feature (61)..(61): /note="Nucleotide may be methylated to form 5-methylcytosine"
agatcaaggttccttgatgccaggtatgtgaagccataaatctattgcatggctttcccccgtctgtcactccttgtgtattattttctgtaaaactgaccagttggtcttagattcttttg

SEQ ID NO: 10417 - DNA, 122 bp, Homo sapiens
  misc_feature (61)..(62): /note="This region represents a CpG dinucleotide"
  misc_feature (61)..(61): /note="Nucleotide may be methylated to form 5-methylcytosine"
tttgagtgcttggctctgtaatcttggagacactctgcatacaccccacaattaagacatcgcaactccatgcaatgtttcttcagagaaagttagatgcaattagatcatttgaagatgga

SEQ ID NO: 10418 - DNA, 122 bp, Homo sapiens
  misc_feature (61)..(62): /note="This region represents a CpG dinucleotide"
  misc_feature (61)..(61): /note="Nucleotide may be methylated to form 5-methylcytosine"
gcactcagggacagctggctcaggccagctcctggcagatacacccccaggccagctgagcggctgcatacctgcgccttggacctgagaaacagcctgctgagcctgcccctggcaggtgt

SEQ ID NO: 10419 - DNA, 122 bp, Homo sapiens
  misc_feature (61)..(62): /note="This region represents a CpG dinucleotide"
  misc_feature (61)..(61): /note="Nucleotide may be methylated to form 5-methylcytosine"
ttttattctctgggttctctgggttagctcaaataattcatggttttctggcttgtgtgtcggattgtgtgttcaagacaggcttatcatgtctgagatgcttctactgcctttagatctga

SEQ ID NO: 10420 - DNA, 122 bp, Homo sapiens
  misc_feature (61)..(62): /note="This region represents a CpG dinucleotide"
  misc_feature (61)..(61): /note="Nucleotide may be methylated to form 5-methylcytosine"
tcatcagaagcagtagcacccccactgagaaaaacagtacattcaactctgatggtattacgggcataagtgacctcaccaaataggtgctttatctagataggtctatgtgatactcccta

SEQ ID NO: 10421 - DNA, 122 bp, Homo sapiens
  misc_feature (61)..(62): /note="This region represents a CpG dinucleotide"
  misc_feature (61)..(61): /note="Nucleotide may be methylated to form 5-methylcytosine"
tgtgctcttggcctcataatccttggccatgttgtccagttgaaagtatttatggctgggcgctgtggctcacacctgtaatcctggcactttgggagactgaggcgggtggatcatgaggt

SEQ ID NO: 10422 - DNA, 122 bp, Homo sapiens
  misc_feature (61)..(62): /note="This region represents a CpG dinucleotide"
  misc_feature (61)..(61): /note="Nucleotide may be methylated to form 5-methylcytosine"
aatttctgagttttagaatatttactataaaattaagataataacccgttctactccatacggttgtttgtgaagaggaaaggaaaatgtatacaaaaatcatgatacagagtagacaaagg

SEQ ID NO: 10423 - DNA, 122 bp, Homo sapiens
  misc_feature (61)..(62): /note="This region represents a CpG dinucleotide"
  misc_feature (61)..(61): /note="Nucleotide may be methylated to form 5-methylcytosine"
acgtatctccctctttctcatctagaacaactctgctcatggtgattacatgcaaaataacgagagcagcttaatagagcaagctccaatacctcaggacggacttaccgtggcacctcaca

SEQ ID NO: 10424 - DNA, 122 bp, Homo sapiens
  misc_feature (61)..(62): /note="This region represents a CpG dinucleotide"
  misc_feature (61)..(61): /note="Nucleotide may be methylated to form 5-methylcytosine"
tctctggaacccatggcacttagctgctatggcttttgtgctcatcagcaaactggaatgcgcttccattagacttatcctttcaccttagattccttaaggcaggaactgtcctgtactta

SEQ ID NO: 10425 - DNA, 122 bp, Homo sapiens
  misc_feature (61)..(62): /note="This region represents a CpG dinucleotide"
  misc_feature (61)..(61): /note="Nucleotide may be methylated to form 5-methylcytosine"
caagccacacctgccagagctggcccagtggctctacttctacctgaatttgtcaagggacgcagcctcctgttgcactggaaacacccagacagcagggcagccaactgcatccacccacc

SEQ ID NO: 10426 - DNA, 122 bp, Homo sapiens
  misc_feature (61)..(62): /note="This region represents a CpG dinucleotide"
  misc_feature (61)..(61): /note="Nucleotide may be methylated to form 5-methylcytosine"
ttcaagttttataatgagattacagcacttagtcacatcttcaggctccacttctaaatccggctctcttgctactcccatcacatctgcagttacttcctccactgaaaccttgaaactct

SEQ ID NO: 10427 - DNA, 122 bp, Homo sapiens
  misc_feature (61)..(62): /note="This region represents a CpG dinucleotide"
  misc_feature (61)..(61): /note="Nucleotide may be methylated to form 5-methylcytosine"
atcagactcttacagccagtcattgaagtctcctttaaatgatatgtctgatgatgatgacgatgatgatagcagtgactaaggacacatttgggagtatttaatcaggtgtggctatctga

SEQ ID NO: 10428 - DNA, 122 bp, Homo sapiens
  misc_feature (61)..(62): /note="This region represents a CpG dinucleotide"
  misc_feature (61)..(61): /note="Nucleotide may be methylated to form 5-methylcytosine"
gacacagtttctaatggccggcatttgcatgtctaagcttgctgtcccagcttgaagagccgggctttcctgctagacaagaaacgttcctggagctgctttaaaagaaacaaaaacttccc

SEQ ID NO: 10429 - DNA, 122 bp, Homo sapiens
  misc_feature (61)..(62): /note="This region represents a CpG dinucleotide"
  misc_feature (61)..(61): /note="Nucleotide may be methylated to form 5-methylcytosine"
aagtagtctcaactttagcctttttgactcaaaatatcccagacctggcaatggaatgagcgggattatctgcctttttgtttcacggcagtccagtcattctgaatgttacctttggtgtt

SEQ ID NO: 10430 - DNA, 122 bp, Homo sapiens
  misc_feature (61)..(62): /note="This region represents a CpG dinucleotide"
  misc_feature (61)..(61): /note="Nucleotide may be methylated to form 5-methylcytosine"
gtaaacatccttgcaatgagagtctgtaacacaggacagtcattgcttactcacaagacacgcagaagcacaagagactcatgaagaatagtctcccagcaaagactgctgggaattgaggg

SEQ ID NO: 10431 - DNA, 122 bp, Homo sapiens
  misc_feature (61)..(62): /note="This region represents a CpG dinucleotide"
  misc_feature (61)..(61): /note="Nucleotide may be methylated to form 5-methylcytosine"
tgccagctaccactccctctacctgtcccaccagctggctgacttcaaggtccaggacctcgcccgctactacactccagatctgggcagccatagagaggtgacactcccctggggcctga

SEQ ID NO: 10432 - DNA, 122 bp, Homo sapiens
  misc_feature (61)..(62): /note="This region represents a CpG dinucleotide"
  misc_feature (61)..(61): /note="Nucleotide may be methylated to form 5-methylcytosine"
tggggagacactgagaggaagaaagggctgagggcatcctggccaggcgcatggcaccagcgctgcctacctacccataccacacccagcacaaggctgggcccaagtgagtgctgctgtcc

SEQ ID NO: 10433 - DNA, 122 bp, Homo sapiens
  misc_feature (61)..(62): /note="This region represents a CpG dinucleotide"
  misc_feature (61)..(61): /note="Nucleotide may be methylated to form 5-methylcytosine"
ctctaccccttgctgtggacaaatactttaatctgtgtcttaatttcttaatctgagaaacgaggactaaactagctatgtttgtgaggatttgagatgctatgtagaaatacctggcactg

SEQ ID NO: 10434 - DNA, 122 bp, Homo sapiens
  misc_feature (61)..(62): /note="This region represents a CpG dinucleotide"
  misc_feature (61)..(61): /note="Nucleotide may be methylated to form 5-methylcytosine"
tcttagaatgcagaatctcaggccccagcccaagctgctgagtcagcacctgcatctaaacgagcaaacatctcaagcctccatgtgcattgggagctctgcagagaaatcaagcagtgaga

SEQ ID NO: 10435 - DNA, 122 bp, Homo sapiens
  misc_feature (61)..(62): /note="This region represents a CpG dinucleotide"
  misc_feature (61)..(61): /note="Nucleotide may be methylated to form 5-methylcytosine"
ggtagatgtaattcttaatgacaacagatatacgtgaaaaagcgaatcataggctgccatcgtcatagggcttatgctataaaatgctacttctaaaccagaggatttgctgaaagatgctg

SEQ ID NO: 10436 - DNA, 122 bp, Homo sapiens
  misc_feature (61)..(62): /note="This region represents a CpG dinucleotide"
  misc_feature (61)..(61): /note="Nucleotide may be methylated to form 5-methylcytosine"
caggctctgggtgatctggtttctgtctgcctctgccacctcttctggtgcagctctgctcgtcactgctgaagccacactgggatatggcttgttcttggacacccagagtaatttcttag

SEQ ID NO: 10437 - DNA, 122 bp, Homo sapiens
  misc_feature (61)..(62): /note="This region represents a CpG dinucleotide"
  misc_feature (61)..(61): /note="Nucleotide may be methylated to form 5-methylcytosine"
tttggcaccttaattatatctgcaataatcctttacagcaatacctagattaatgttccacggaataactagaagatatatgtacactaggagctaagaacttaggggtcatctaagaatcc

SEQ ID NO: 10438 - DNA, 122 bp, Homo sapiens
  misc_feature (61)..(62): /note="This region represents a CpG dinucleotide"
  misc_feature (61)..(61): /note="Nucleotide may be methylated to form 5-methylcytosine"
ctttgtggtttgctgtctcatagcatgggggtagtggttcagggctccaagtgcgagtgtcggagtgaaaaggtgatgtcaccttttataactgagccttgggatcacactgtctcatttcc

SEQ ID NO: 10439 - DNA, 122 bp, Homo sapiens
  misc_feature (61)..(62): /note="This region represents a CpG dinucleotide"
  misc_feature (61)..(61): /note="Nucleotide may be methylated to form 5-methylcytosine"
tggttttagagcaacatgatgttacctttttcattacactgttcttttgaaacagtatagcggtttgtacatagtattcttgcctcgtgggaaacactcagtttaggaggagcacattccct

SEQ ID NO: 10440 - DNA, 122 bp, Homo sapiens
  misc_feature (61)..(62): /note="This region represents a CpG dinucleotide"
  misc_feature (61)..(61): /note="Nucleotide may be methylated to form 5-methylcytosine"
gagtcacaggtttcccaagcttcccggacctgttcaggaaatgtggtgtggctggggttccgcctttctcataagctccgagtaaagccaatacagctgatccactggccactctgaaaagc

SEQ ID NO: 10441 - DNA, 122 bp, Homo sapiens
  misc_feature (61)..(62): /note="This region represents a CpG dinucleotide"
  misc_feature (61)..(61): /note="Nucleotide may be methylated to form 5-methylcytosine"
tgtaccccttacttacctggtggcatctgagttccacttgccatctctttctacaaatgacgagaaagcacagcaagcctagctggctctgcagctttccatgggaactttgtcttcctcca

SEQ ID NO: 10442 - DNA, 122 bp, Homo sapiens
  misc_feature (61)..(62): /note="This region represents a CpG dinucleotide"
  misc_feature (61)..(61): /note="Nucleotide may be methylated to form 5-methylcytosine"
gaaaacacaaatgagtgcaagtctttgaaactacaaatccaactccatgaggctggacgccgctttctccccaaaataaagccaagaccattgaagttggcataggtggcttccagttgtgg

SEQ ID NO: 10443 - DNA, 122 bp, Homo sapiens
  misc_feature (61)..(62): /note="This region represents a CpG dinucleotide"
  misc_feature (61)..(61): /note="Nucleotide may be methylated to form 5-methylcytosine"
ggtggagactgccttcctgccaggtcagacagcctgtttttaatcactactctgcagttccgccatgtgatgccaagatggctggttaaagtccaggacaagggaaaaaatggctgactaat

SEQ ID NO: 10444 - DNA, 122 bp, Homo sapiens
  misc_feature (61)..(62): /note="This region represents a CpG dinucleotide"
  misc_feature (61)..(61): /note="Nucleotide may be methylated to form 5-methylcytosine"
taatgataacttcttttcatatctgatgcttgtcatgtgtgtcttctatttttgctttgacgtaagttttcatttgtataaatacctggggcatagttgctggattatatggtaagactgtt

SEQ ID NO: 10445 - DNA, 122 bp, Homo sapiens
  misc_feature (61)..(62): /note="This region represents a CpG dinucleotide"
  misc_feature (61)..(61): /note="Nucleotide may be methylated to form 5-methylcytosine"
cccaaaactggcctcattgactacaaccagctggcactgactgctcgacttttccggccacggctcatcatagctggcaccagcgcctatgctcgcctcattgactacgcccgcatgagaga

SEQ ID NO: 10446 - DNA, 122 bp, Homo sapiens
  misc_feature (61)..(62): /note="This region represents a CpG dinucleotide"
  misc_feature (61)..(61): /note="Nucleotide may be methylated to form 5-methylcytosine"
ttgcctcatttttctcctaactggaagtgacaaggcaggcagctctagcctcatgacaagcgtggtggctcacgcctgtaatcccagcactttgggaggccgaagcaggtggattacctgag

SEQ ID NO: 10447 - DNA, 122 bp, Homo sapiens
  misc_feature (61)..(62): /note="This region represents a CpG dinucleotide"
  misc_feature (61)..(61): /note="Nucleotide may be methylated to form 5-methylcytosine"
agcccagctgtttggcccacattaccatgctaatggcacctgggatctaatttacatctgcgtgtcttcactgtttgcttcttaagtaaatacatctgggaaagttctatacctacaaacaa

SEQ ID NO: 10448 - DNA, 122 bp, Homo sapiens
  misc_feature (61)..(62): /note="This region represents a CpG dinucleotide"
  misc_feature (61)..(61): /note="Nucleotide may be methylated to form 5-methylcytosine"
ctactcacgtatgtcctcgggccaggccctgccctgtgaacctgtgagcacagccttccacgcctagcccagccctgaatgatatcccaccacagttgtgatgggccagcaactaaagcaac

SEQ ID NO: 10449 - DNA, 122 bp, Homo sapiens
  misc_feature (61)..(62): /note="This region represents a CpG dinucleotide"
  misc_feature (61)..(61): /note="Nucleotide may be methylated to form 5-methylcytosine"
cagccttgagattcttgccctctctctgttacgtcagtggtggggaacctggggcagattcgcctccgtggcttctcctgcatgactgcgttgggctgagggagatatgccaggttagtgcc

SEQ ID NO: 10450 - DNA, 122 bp, Homo sapiens
  misc_feature (61)..(62): /note="This region represents a CpG dinucleotide"
  misc_feature (61)..(61): /note="Nucleotide may be methylated to form 5-methylcytosine"
tgtatctggcgagggcctccttgctgaatcatcccatggtggaaagtggaagggcaacagcgcacttgtgggagagagagcaggacatcaaactcacagcctcaagctcttttctaattggc

SEQ ID NO: 10451 - DNA, 122 bp, Homo sapiens
  misc_feature (61)..(62): /note="This region represents a CpG dinucleotide"
  misc_feature (61)..(61): /note="Nucleotide may be methylated to form 5-methylcytosine"
ttaccagggtgctcctttaggcctggctctgacatcttcattcacctgctgtgtgtgtgacgctttaaaatccaaagctttgaaagtactgtgttattagtcacttccaaatgtaattttcc

SEQ ID NO: 10452 - DNA, 122 bp, Homo sapiens
  misc_feature (61)..(62): /note="This region represents a CpG dinucleotide"
  misc_feature (61)..(61): /note="Nucleotide may be methylated to form 5-methylcytosine"
ctaaacaggctattaaaatatcacgagaatatcacagagctggaggctattaaaatatcacggaggggctgggcgtggtggctcacgcctgtaatcccagcactttgggaagctgaggcagg

SEQ ID NO: 10453 - DNA, 122 bp, Homo sapiens
  misc_feature (61)..(62): /note="This region represents a CpG dinucleotide"
  misc_feature (61)..(61): /note="Nucleotide may be methylated to form 5-methylcytosine"
tttgtaccaaggtctggaaatgactcatagcacttctattttctgttaagaatctagtcacgtggccacacctggtaatcaccagctgagtagccatgtgcccagatgccattttactatta

SEQ ID NO: 10454 - DNA, 122 bp, Homo sapiens
  misc_feature (61)..(62): /note="This region represents a CpG dinucleotide"
  misc_feature (61)..(61): /note="Nucleotide may be methylated to form 5-methylcytosine"
aacaaaaagatgtcggtgcacgtgtcactgatgattaagttaacattgcattatctctgacggcattccgaatggcacagggctacagaagaggaacattttacacagccacgctcctgatc

SEQ ID NO: 10455 - DNA, 122 bp, Homo sapiens
  misc_feature (61)..(62): /note="This region represents a CpG dinucleotide"
  misc_feature (61)..(61): /note="Nucleotide may be methylated to form 5-methylcytosine"
ctcagttggtgatcaggaaggaatccctgaggaggcgacagttaagttacagcccagggccgggcgcggtggctcacgcctgtaatcccaacactttagaaggctgaggcaggcagatcatt

SEQ ID NO: 10456 - DNA, 122 bp, Homo sapiens
  misc_feature (61)..(62): /note="This region represents a CpG dinucleotide"
  misc_feature (61)..(61): /note="Nucleotide may be methylated to form 5-methylcytosine"
ttgatctgacctgtggaaggcacagccatctaatcttcctgcttagccaaggagcaggcccgcctacaggttacacaatggcagacacaagcaccagcaggagggaaaagtttcagtgggca

SEQ ID NO: 10457 - DNA, 122 bp, Homo sapiens
  misc_feature (61)..(62): /note="This region represents a CpG dinucleotide"
  misc_feature (61)..(61): /note="Nucleotide may be methylated to form 5-methylcytosine"
aaagccagcaagactcctcataccagaggctggatggtttctgcaaatggtgacaccagccgtaacattttccagggggttgatctcagaggcagccaaacctcggggagcaccaaagcaga

SEQ ID NO: 10458 - DNA, 122 bp, Homo sapiens
  misc_feature (61)..(62): /note="This region represents a CpG dinucleotide"
  misc_feature (61)..(61): /note="Nucleotide may be methylated to form 5-methylcytosine"
atcagggggctgatgcagtggcttcagtgtcagtgactaaccagtggccctggagtgactcgtaaggcaggtaccctgtggacagttatttgtctgggggaggttagtgccacccactccag

SEQ ID NO: 10459 - DNA, 122 bp, Homo sapiens
  misc_feature (61)..(62): /note="This region represents a CpG dinucleotide"
  misc_feature (61)..(61): /note="Nucleotide may be methylated to form 5-methylcytosine"
cctaacagtatgccccactaacgaatgaggaaataggctcagagaagttaagtaacttgacgtcagttatccagctactaagtaaagaggcaggctctatgcaagactgattctttaaccac

SEQ ID NO: 10460 - DNA, 122 bp, Homo sapiens
  misc_feature (61)..(62): /note="This region represents a CpG dinucleotide"
  misc_feature (61)..(61): /note="Nucleotide may be methylated to form 5-methylcytosine"
cagaacctgtgccatccagatgggagcagtaagggtgtagggcaaagttagtgagctgcccggtgcacgaggacttccatgataatcagggctgaaccaggaaggcaggtcaaggccagggt

SEQ ID NO: 10461 - DNA, 122 bp, Homo sapiens
  misc_feature (61)..(62): /note="This region represents a CpG dinucleotide"
  misc_feature (61)..(61): /note="Nucleotide may be methylated to form 5-methylcytosine"
tcctttagtttatcctgtccccaaatcctagggtgtttgtgacaatcaaataagaagttacgtaagtagatagaaacttgtcagcccagtatgggccaatgcaggaagttttggacttggaa

SEQ ID NO: 10462 - DNA, 122 bp, Homo sapiens
  misc_feature (61)..(62): /note="This region represents a CpG dinucleotide"
  misc_feature (61)..(61): /note="Nucleotide may be methylated to form 5-methylcytosine"
tcaggtaatccgcccgcctcggcctcccaaagtgctgggattacaggcgttaagtcacctcgcccagcctttgagaaagggattcttcacatgaattgatgtgagcacacccaaaccaacct

SEQ ID NO: 10463 - DNA, 122 bp, Homo sapiens
  misc_feature (61)..(62): /note="This region represents a CpG dinucleotide"
  misc_feature (61)..(61): /note="Nucleotide may be methylated to form 5-methylcytosine"
cgatggattgtttcaggccaggcccactgcttgctgtactttaatgtcattgctgcttatcgccttctctgcagccttgttgacactcctgacaacaagtgtttgtctttggcttctagggc

SEQ ID NO: 10464 - DNA, 122 bp, Homo sapiens
  misc_feature (61)..(62): /note="This region represents a CpG dinucleotide"
  misc_feature (61)..(61): /note="Nucleotide may be methylated to form 5-methylcytosine"
aggagtgtggcgtaattagttcatgcagctgtactcactgagctcctgctctagccctagcggtgttctaagctctagctggctcattagatgcagtgagtgtagcaatcagggaaggttac

SEQ ID NO: 10465 - DNA, 122 bp, Homo sapiens
  misc_feature (61)..(62): /note="This region represents a CpG dinucleotide"
  misc_feature (61)..(61): /note="Nucleotide may be methylated to form 5-methylcytosine"
tgggggccagctgggccaccacatatagctgtgtaggttgtgacttgcgcaactccaggccgtcccttttcacattagcatctataccctagccttacttttatcccccaggccattcctac

SEQ ID NO: 10466 - DNA, 122 bp, Homo sapiens
  misc_feature (61)..(62): /note="This region represents a CpG dinucleotide"
  misc_feature (61)..(61): /note="Nucleotide may be methylated to form 5-methylcytosine"
tttacatgtactcatgcaaaagaagggtgagataatggacttgccccagtgtggaactggcggaacagtgtgtgtgattcttattgtgaaacattcttaaatttgaggctcaaataataaat

SEQ ID NO: 10467 - DNA, 122 bp, Homo sapiens
  misc_feature (61)..(62): /note="This region represents a CpG dinucleotide"
  misc_feature (61)..(61): /note="Nucleotide may be methylated to form 5-methylcytosine"
cagacactgcggcagcagctgcttccagagtccaggaaatctggtgacactattcttattcgtggtttggcagattcagagatggtggcagcttgggaggttgcgacagcttcatccctggt

SEQ ID NO: 10468 - DNA, 122 bp, Homo sapiens
  misc_feature (61)..(62): /note="This region represents a CpG dinucleotide"
  misc_feature (61)..(61): /note="Nucleotide may be methylated to form 5-methylcytosine"
agactcaactgggctaacataggggcaaagttggtatcccaagcttctcagctatctatccgcccaaagttgctcttctgccaagctcattgtttaccaagctgccagcccagcccagggat

SEQ ID NO: 10469 - DNA, 122 bp, Homo sapiens
  misc_feature (61)..(62): /note="This region represents a CpG dinucleotide"
  misc_feature (61)..(61): /note="Nucleotide may be methylated to form 5-methylcytosine"
aatgtcagagatcctgtctatagggacaacagggatgcaaacagtcagtaactagtgctacgtgatttttagcaacaaggaagtgaatcagagcacagcctggtgagtgcttaattatgact

SEQ ID NO: 10470 - DNA, 122 bp, Homo sapiens
  misc_feature (61)..(62): /note="This region represents a CpG dinucleotide"
  misc_feature (61)..(61): /note="Nucleotide may be methylated to form 5-methylcytosine"
tgtgttgttgagtataccaaaacagaactgccagccattagcccatggcttttctgcctacgtgaaaacagcaggattatagtacaaagggcagagacctaagccaagattatgtgctaaga

SEQ ID NO: 10471 - DNA, 122 bp, Homo sapiens
  misc_feature (61)..(62): /note="This region represents a CpG dinucleotide"
  misc_feature (61)..(61): /note="Nucleotide may be methylated to form 5-methylcytosine"
ctactgtaatgagtcagtgaggaccatttacaacacacctatgcaaaggcatccgggagacgagttcaaacttgacttggggacacccaagtcctgcagccttaggatgccctattgatagc

SEQ ID NO: 10472 - DNA, 122 bp, Homo sapiens
  misc_feature (61)..(62): /note="This region represents a CpG dinucleotide"
  misc_feature (61)..(61): /note="Nucleotide may be methylated to form 5-methylcytosine"
ggtttagcagtatgtagatcttttaaaaggtagatgtaattcttaatgacaacagatatacgtgaaaaagcgaatcataggctgccatcgtcatagggcttatgctataaaatgctacttct

SEQ ID NO: 10473 - DNA, 122 bp, Homo sapiens
  misc_feature (61)..(62): /note="This region represents a CpG dinucleotide"
  misc_feature (61)..(61): /note="Nucleotide may be methylated to form 5-methylcytosine"
ccaacccaaggattgcctgggtaagaacacctctctcatacacacacctacagtgacaggcgtgtatagtgacatgtagaacaatacatcacagtgatgggtgccagtgacagcttgatatc

SEQ ID NO: 10474 - DNA, 122 bp, Homo sapiens
  misc_feature (61)..(62): /note="This region represents a CpG dinucleotide"
  misc_feature (61)..(61): /note="Nucleotide may be methylated to form 5-methylcytosine"
caggggaatgagcaaatctcaaagagctggcgtcttagaactccctggcttatatagcatcgacaaagaacagtaaatttttagagaaacaacaaaacaaagaaaaagagctttgagtctgt

SEQ ID NO: 10475 - DNA, 122 bp, Homo sapiens
  misc_feature (61)..(62): /note="This region represents a CpG dinucleotide"
  misc_feature (61)..(61): /note="Nucleotide may be methylated to form 5-methylcytosine"
tctataaggtgagagtagacccacagaatagctccaggaagcatggtagcttgagatcatcgcacaagctaattctgggaaggtatccaagaatcagaaaattccactcttcagagaagtta

SEQ ID NO: 10476 - DNA, 122 bp, Homo sapiens
  misc_feature (61)..(62): /note="This region represents a CpG dinucleotide"
  misc_feature (61)..(61): /note="Nucleotide may be methylated to form 5-methylcytosine"
acttcaccagcaacctaggcatctttcaattcactcaagttgacacctaatattaactaccgcgagaggtaaagctcccgcctaagttagcaaggggagctgatgagtaagaggggacaaaa

SEQ ID NO: 10477 - DNA, 122 bp, Homo sapiens
  misc_feature (61)..(62): /note="This region represents a CpG dinucleotide"
  misc_feature (61)..(61): /note="Nucleotide may be methylated to form 5-methylcytosine"
cttctgggctcaagtgatcatcctaccttagcctctcagttagctgggacttcaggttcacgtcaccatgcccagctaatttttttcttttttttgagaaggagtcttgctctgtcatccag

SEQ ID NO: 10478 - DNA, 122 bp, Homo sapiens
  misc_feature (61)..(62): /note="This region represents a CpG dinucleotide"
  misc_feature (61)..(61): /note="Nucleotide may be methylated to form 5-methylcytosine"
gatgagggggtgcagaatatcaggtgggtttgagggctatgaaggcaaaggggttctgggcgtcacttgctatatagcacaggttgacagcaagcatggtgagtgatcctccccactgtgaa

SEQ ID NO: 10479 - DNA, 122 bp, Homo sapiens
  misc_feature (61)..(62): /note="This region represents a CpG dinucleotide"
  misc_feature (61)..(61): /note="Nucleotide may be methylated to form 5-methylcytosine"
agtgtccacagcaagtacaacgagactgtacatgaatccatacatcaaaacacagccgagcgcagtggctcatgcctgtagtcccagcactttgggaggtcgaggcaggaggagcacttgag

SEQ ID NO: 10480 - DNA, 122 bp, Homo sapiens
  misc_feature (61)..(62): /note="This region represents a CpG dinucleotide"
  misc_feature (61)..(61): /note="Nucleotide may be methylated to form 5-methylcytosine"
agctccatagatttccctgagaggactttgtttacttgggaaagggaatggagaactttccgggctaagtttgttgttgaaagcaatacagatcttggtgaagagcaattaataggaggctg

SEQ ID NO: 10481 - DNA, 122 bp, Homo sapiens
  misc_feature (61)..(62): /note="This region represents a CpG dinucleotide"
  misc_feature (61)..(61): /note="Nucleotide may be methylated to form 5-methylcytosine"
aaatattaatttgaagggcaaactactggccttctctggagtgatctgcccttgacctcacgggtgaagcctgtgcatatgcagttttaagaagtgctacagataattgagatcctggttaa

SEQ ID NO: 10482 - DNA, 122 bp, Homo sapiens
  misc_feature (61)..(62): /note="This region represents a CpG dinucleotide"
  misc_feature (61)..(61): /note="Nucleotide may be methylated to form 5-methylcytosine"
aatgaagtcagatgaccgagacactgattcttatcctcagaaaccacagctgtcacagagcgctttaatttattcattgattggctgtgaaaaccacagctaaatgtctgaggtgcaacttc

SEQ ID NO: 10483 - DNA, 122 bp, Homo sapiens
  misc_feature (61)..(62): /note="This region represents a CpG dinucleotide"
  misc_feature (61)..(61): /note="Nucleotide may be methylated to form 5-methylcytosine"
gcgggtgcaagaactcccaggtcactgctttattcagaggacctaaggaattgggttgagcggaagcgcacagagctgcagattttctttgatgaatgaaagcttcaatccacaggtttcta

SEQ ID NO: 10484 - DNA, 122 bp, Homo sapiens
  misc_feature (61)..(62): /note="This region represents a CpG dinucleotide"
  misc_feature (61)..(61): /note="Nucleotide may be methylated to form 5-methylcytosine"
ctggcataagtacaccatctggatctatcacgggaccgtttaaagggaaaaacaaccttacgctttgcttttggtgttttaagaagaatatgaagcctaacgtgggcccataaatgccagac

SEQ ID NO: 10485 - DNA, 122 bp, Homo sapiens
  misc_feature (61)..(62): /note="This region represents a CpG dinucleotide"
  misc_feature (61)..(61): /note="Nucleotide may be methylated to form 5-methylcytosine"
agtgaggtagatgctattatttcattttacaaatgcaggtactgaagatcagagatgttacgtcactcaccaaagtcacacagctggttagcgcagggtcaggaatcaaccctaagtctgta

SEQ ID NO: 10486 - DNA, 122 bp, Homo sapiens
  misc_feature (61)..(62): /note="This region represents a CpG dinucleotide"
  misc_feature (61)..(61): /note="Nucleotide may be methylated to form 5-methylcytosine"
tcatgtgttatcaaaagcaacttgtgtttcctttaaagccaactgccccagtgaagtgcccgttggttaagaaaagtcaacaaaccataaagtgaaataaggaactgacaggacttcaaaga

SEQ ID NO: 10487 - DNA, 122 bp, Homo sapiens
  misc_feature (61)..(62): /note="This region represents a CpG dinucleotide"
  misc_feature (61)..(61): /note="Nucleotide may be methylated to form 5-methylcytosine"
tatagagtacaaatggaagtaaaagagtaattgcaatttgaccccaaaaaagctacgtggcgctcccatctggctgttcctgtactgaagttctcagtaagtttctactttaaaacagattg

SEQ ID NO: 10488 - DNA, 122 bp, Homo sapiens
  misc_feature (61)..(62): /note="This region represents a CpG dinucleotide"
  misc_feature (61)..(61): /note="Nucleotide may be methylated to form 5-methylcytosine"
tcagggtcctttcagaaaataggaaccattctaaatacttcaaacagggataatttaatacgggatattaaatgatataggtgatgaaagctctagaagccaaaccaggaatggtgactcat

SEQ ID NO: 10489 - DNA, 122 bp, Homo sapiens
  misc_feature (61)..(62): /note="This region represents a CpG dinucleotide"
  misc_feature (61)..(61): /note="Nucleotide may be methylated to form 5-methylcytosine"
agttgttccctttccatcgaatgctgttttcctatgagcttggtgtggttggctccttctcgtcattctcatcttggctatgtcaccttttctgagaagacacccctgatcagcaaatctaa

SEQ ID NO: 10490 - DNA, 122 bp, Homo sapiens
  misc_feature (61)..(62): /note="This region represents a CpG dinucleotide"
  misc_feature (61)..(61): /note="Nucleotide may be methylated to form 5-methylcytosine"
ctcctcataggcaggaaatggcagtaagtgaatgtgctaattctgcaacatgggagaagacgtggcctgaaggataattgagggtgtgtaataacactttatgtttcagactaaaccatgtg

SEQ ID NO: 10491 - DNA, 122 bp, Homo sapiens
  misc_feature (61)..(62): /note="This region represents a CpG dinucleotide"
  misc_feature (61)..(61): /note="Nucleotide may be methylated to form 5-methylcytosine"
catggatccaaaagctctctctgatacatatatggtgatttccatttaattaactgtttccggggagcacctagagccattaccaaaggtgctaactgggcagccaatgggaaaactcttaa

SEQ ID NO: 10492 - DNA, 122 bp, Homo sapiens
  misc_feature (61)..(62): /note="This region represents a CpG dinucleotide"
  misc_feature (61)..(61): /note="Nucleotide may be methylated to form 5-methylcytosine"
tagcttacgtagtggaacagtaaatagtattaactggctaatgaccgacacagcaggctccgccacctctccctatgctcacccaatgatcacctcaccatcagcccaccctcagcctatag

SEQ ID NO: 10493 - DNA, 122 bp, Homo sapiens
  misc_feature (61)..(62): /note="This region represents a CpG dinucleotide"
  misc_feature (61)..(61): /note="Nucleotide may be methylated to form 5-methylcytosine"
caggaagtgctaacaatctggaaacagcctgtgcctgaagaagagctcaattcagcatgacggtagaccaggctggtactgtaactcttggttctgctcagaagctggtcttaacgggctct

SEQ ID NO: 10494 - DNA, 122 bp, Homo sapiens
  misc_feature (61)..(62): /note="This region represents a CpG dinucleotide"
  misc_feature (61)..(61): /note="Nucleotide may be methylated to form 5-methylcytosine"
cctcccatatatcctgaatcctgggaattctgaaatagctaagatgtgattataggctctcgggaacttttataaggaatacatacagaaataatgattgtagtggtatcttgtattaaaac

SEQ ID NO: 10495 - DNA, 122 bp, Homo sapiens
  misc_feature (61)..(62): /note="This region represents a CpG dinucleotide"
  misc_feature (61)..(61): /note="Nucleotide may be methylated to form 5-methylcytosine"
tgagcattcagtcttctgacctgttccacctctacagggcattttatggcttaaggatgacggcctagaagggaagggagagacttactttggattaaatttacaatgggaaagtgcttaag

SEQ ID NO: 10496 - DNA, 122 bp, Homo sapiens
  misc_feature (61)..(62): /note="This region represents a CpG dinucleotide"
  misc_feature (61)..(61): /note="Nucleotide may be methylated to form 5-methylcytosine"
actttgtcttgaatgtctctcagtcagattcctgcagaataagcatgcaattggctcatccgacatatccagtgagattatccttgattggcagaatgctagttccacacttcctacaagaa

SEQ ID NO: 10497 - DNA, 122 bp, Homo sapiens
  misc_feature (61)..(62): /note="This region represents a CpG dinucleotide"
  misc_feature (61)..(61): /note="Nucleotide may be methylated to form 5-methylcytosine"
gccaaacaagtgtcaaccccactcggtctgataccaaagcctgtgatcatctctctctcacgatgcagcttcgcttgggtcgaccaccttaaaagactcttgtgtcatggggtcttagttta

SEQ ID NO: 10498 - DNA, 122 bp, Homo sapiens
  misc_feature (61)..(62): /note="This region represents a CpG dinucleotide"
  misc_feature (61)..(61): /note="Nucleotide may be methylated to form 5-methylcytosine"
tgagtcacatatggacaggaatagccacatgttgtctattaatttggattttgctttccacggtcagttatgcctgctatgacatggtatgaaatggggatcagccattcaaagaatccaaa

SEQ ID NO: 10499 - DNA, 122 bp, Homo sapiens
  misc_feature (61)..(62): /note="This region represents a CpG dinucleotide"
  misc_feature (61)..(61): /note="Nucleotide may be methylated to form 5-methylcytosine"
acaggcatggggtttctttttggggtgatagaatgttccaaaattgactggggtaatggccgtacaactttgtgaatacagtaaaaaacaatgaattgccaatgagtgaattttatggtatg

SEQ ID NO: 10500 - DNA, 122 bp, Homo sapiens
  misc_feature (61)..(62): /note="This region represents a CpG dinucleotide"
  misc_feature (61)..(61): /note="Nucleotide may be methylated to form 5-methylcytosine"
catatatattacacatggtccctgcccccaagaacttacagcctaaaagaagacacccatcgacaatttcaatccagagtgttaagtgctgttacagaggagctggggagaggctgcatagt

SEQ ID NO: 10501 - DNA, 122 bp, Homo sapiens
  misc_feature (61)..(62): /note="This region represents a CpG dinucleotide"
  misc_feature (61)..(61): /note="Nucleotide may be methylated to form 5-methylcytosine"
tcattgtccagtctcactctggttaactgggcaatacctggttctaaagcttgtatgtcacgaggtattctaggaagcatgactccaacgagcacttgcattcttgatgatggtataaagaa

SEQ ID NO: 10502 - DNA, 122 bp, Homo sapiens
  misc_feature (61)..(62): /note="This region represents a CpG dinucleotide"
  misc_feature (61)..(61): /note="Nucleotide may be methylated to form 5-methylcytosine"
gggtgctggagggaagggcgcctgggtcgccagggcagcatagagtcccttgtggagtgccgcagattttggaggcaggatcccattcctgtcgcagaacccagacctcctgcctcccagcc

SEQ ID NO: 10503 - DNA, 122 bp, Homo sapiens
  misc_feature (61)..(62): /note="This region represents a CpG dinucleotide"
  misc_feature (61)..(61): /note="Nucleotide may be methylated to form 5-methylcytosine"
gattctgttcagcagtgtacagaattggagccatagtagaaggaggtggagattggagagcgcctagctcagcacccttggcgactagttgtagccctgactccttggagtgatctgtatgt

SEQ ID NO: 10504 - DNA, 122 bp, Homo sapiens
  misc_feature (61)..(62): /note="This region represents a CpG dinucleotide"
  misc_feature (61)..(61): /note="Nucleotide may be methylated to form 5-methylcytosine"
atccaggagtgtgcaccggtcatgcaaggtgtgtctgttcaaagcccaagatgataagaccgctgtactcactgaggtttggccatcctacgctgacataaagtggggcagctgcagaccct

SEQ ID NO: 10505 - DNA, 122 bp, Homo sapiens
  misc_feature (61)..(62): /note="This region represents a CpG dinucleotide"
  misc_feature (61)..(61): /note="Nucleotide may be methylated to form 5-methylcytosine"
ggagagctctacccagggccacacccaggacagcagagctcacctttgatcccctgatttcgccctggagaaggtggcacccagaatagaagccaggcatgggagggctggagtggagggac

SEQ ID NO: 10506 - DNA, 122 bp, Homo sapiens
  misc_feature (61)..(62): /note="This region represents a CpG dinucleotide"
  misc_feature (61)..(61): /note="Nucleotide may be methylated to form 5-methylcytosine"
tggccccttcatggcacagcgacagctttgccatcagccggcaagcatgcggggtgtggacgacacagccggagagagcagaggccaggctcatgaatcggacaacgagctcgagttttcaa

SEQ ID NO: 10507 - DNA, 122 bp, Homo sapiens
  misc_feature (61)..(62): /note="This region represents a CpG dinucleotide"
  misc_feature (61)..(61): /note="Nucleotide may be methylated to form 5-methylcytosine"
gcagcaggttctttgagaagctaaaacctgaagataaaacctgtttcaggttacagcaggcggtttcagcagccaggcttgctgagaattccattcttagagcaatgttatgtgccctgagg

SEQ ID NO: 10508 - DNA, 122 bp, Homo sapiens
  misc_feature (61)..(62): /note="This region represents a CpG dinucleotide"
  misc_feature (61)..(61): /note="Nucleotide may be methylated to form 5-methylcytosine"
ggatactttgttagggcccctcctgggccctggaggtggagcctcatgttagggtggatgcgcctctgccctgaatctgcaatgggccaagtgcaaagctgtgttgtcagtgccagatggcc

SEQ ID NO: 10509 - DNA, 122 bp, Homo sapiens
  misc_feature (61)..(62): /note="This region represents a CpG dinucleotide"
  misc_feature (61)..(61): /note="Nucleotide may be methylated to form 5-methylcytosine"
actttgctaagtactccatgcagattaccttatttaaccctcacatgtagtacctaagaacgtcggctccaaagccaggttgagtttgaatgctgactcctccgtgtcttagctgtgtgatc

SEQ ID NO: 10510 - DNA, 122 bp, Homo sapiens
  misc_feature (61)..(62): /note="This region represents a CpG dinucleotide"
  misc_feature (61)..(61): /note="Nucleotide may be methylated to form 5-methylcytosine"
ggaaggattcaggctatggaaaccggctcgaggtcaggcggcgtggagttgccagggctgcggttctaagacaagtgtctcacccagttcgcacccatcgcgaaacagattcaaggcacaat

SEQ ID NO: 10511 - DNA, 122 bp, Homo sapiens
  misc_feature (61)..(62): /note="This region represents a CpG dinucleotide"
  misc_feature (61)..(61): /note="Nucleotide may be methylated to form 5-methylcytosine"
aacagaagaaatagcactgctatttgttagaactgctcgaccacatggcttcatttacatcgttacattgggctgagttgtggggctgaggttaaaagtttagtcttcagacaaaacaggtg

SEQ ID NO: 10512 - DNA, 122 bp, Homo sapiens
  misc_feature (61)..(62): /note="This region represents a CpG dinucleotide"
  misc_feature (61)..(61): /note="Nucleotide may be methylated to form 5-methylcytosine"
tggggggataacacataatccattgtgtaataacttcttaggtcaccaatcatgtaccagcgcaagctctgtgccaggccctgttaggtgcccacagcatgagacttaataagccaagagct

SEQ ID NO: 10513 - DNA, 122 bp, Homo sapiens
  misc_feature (61)..(62): /note="This region represents a CpG dinucleotide"
  misc_feature (61)..(61): /note="Nucleotide may be methylated to form 5-methylcytosine"
catatttcagcagaggtcctcagtagagccacatgcaggagatacatgcatttgtccactcgtcactcacttagtcatttgttcacttatatatccactctctcactcatgccttcagtcat

SEQ ID NO: 10514 - DNA, 122 bp, Homo sapiens
  misc_feature (61)..(62): /note="This region represents a CpG dinucleotide"
  misc_feature (61)..(61): /note="Nucleotide may be methylated to form 5-methylcytosine"
cctcggggtgagggaggccactctataaggagaccatgtgtgtggaagcaccttgggaaacgctgcgcgcaggccgggacccagggcagtcggccttccttatccatggattcaatgaactg

SEQ ID NO: 10515 - DNA, 122 bp, Homo sapiens
  misc_feature (61)..(62): /note="This region represents a CpG dinucleotide"
  misc_feature (61)..(61): /note="Nucleotide may be methylated to form 5-methylcytosine"
gtaggatttctgcctggctctagtgatcaggctggacatccctgataatctgcttcaccccgttgctcctctgagcctgggtcctgccttgctgttctgagtcctccctctgtaggagttca

SEQ ID NO: 10516 - DNA, 122 bp, Homo sapiens
  misc_feature (61)..(62): /note="This region represents a CpG dinucleotide"
  misc_feature (61)..(61): /note="Nucleotide may be methylated to form 5-methylcytosine"
gcaggaaggactcggcagaataatgagctgtcaaacagattctagccaggcatagggtgacgctccaggctgatgagctctgtgccagaaggctggtgacaccagctggccacaaaaggcca

SEQ ID NO: 10517 - DNA, 122 bp, Homo sapiens
  misc_feature (61)..(62): /note="This region represents a CpG dinucleotide"
  misc_feature (61)..(61): /note="Nucleotide may be methylated to form 5-methylcytosine"
ctctgcttcctgcctgtgtgtctcacacagattcctcttgctggaaccttttgtttccttcggaacagcctcaatctttgaaaagcaactgagccttaactctagtatgatggctcttgagt

SEQ ID NO: 10518 - DNA, 122 bp, Homo sapiens
  misc_feature (61)..(62): /note="This region represents a CpG dinucleotide"
  misc_feature (61)..(61): /note="Nucleotide may be methylated to form 5-methylcytosine"
tatgctatgtacttcaccctccactgacacatctgatcccattatgtgcctgacctttaacggtcatcaaatcaaagtcattctggtcagttcagtctgggcctgacacatgcccaggtcac

SEQ ID NO: 10519 - DNA, 122 bp, Homo sapiens
  misc_feature (61)..(62): /note="This region represents a CpG dinucleotide"
  misc_feature (61)..(61): /note="Nucleotide may be methylated to form 5-methylcytosine"
taggtagcttaaaatcagacatgctatgagtatttacaccagagaaataggccaacactacgaggcaggatttgtgggtattgtttttcagaaaacttggtttttcagcacaacactgctct

SEQ ID NO: 10520 - DNA, 122 bp, Homo sapiens
  misc_feature (61)..(62): /note="This region represents a CpG dinucleotide"
  misc_feature (61)..(61): /note="Nucleotide may be methylated to form 5-methylcytosine"
atattccttacgtctattttcccagggactgactccttttaaataagcatctcaggcgggcgcggtggctcacacctgtaatcccagcactttgcagggcggaggtgggcggatcacctgag

SEQ ID NO: 10521 - DNA, 122 bp, Homo sapiens
  misc_feature (61)..(62): /note="This region represents a CpG dinucleotide"
  misc_feature (61)..(61): /note="Nucleotide may be methylated to form 5-methylcytosine"
ataaaacccaacaacatagaaggaagcctgccttcactctgtgaagagtgtctggacaaacgagagtagtttccaaacactgatcaaggatttctcccatccacacagtaagacaccagttg

SEQ ID NO: 10522 - DNA, 122 bp, Homo sapiens
  misc_feature (61)..(62): /note="This region represents a CpG dinucleotide"
  misc_feature (61)..(61): /note="Nucleotide may be methylated to form 5-methylcytosine"
tacagtgtgttgtcgtattcacactaacaccactgagaagttgatcctgttattattattcgcagcgacatttcctggcttagacctagcgtactgggtaatgcccatatgttcagaacagt

SEQ ID NO: 10523 - DNA, 122 bp, Homo sapiens
  misc_feature (61)..(62): /note="This region represents a CpG dinucleotide"
  misc_feature (61)..(61): /note="Nucleotide may be methylated to form 5-methylcytosine"
aagtgcagcagagttagagcctgggctggactgtcggtggggtagagtctaagttgtttccggtctgagccttcaagttgctgggctgtccttggcgtggcgagtcccaggagaaccagtga

SEQ ID NO: 10524 - DNA, 122 bp, Homo sapiens
  misc_feature (61)..(62): /note="This region represents a CpG dinucleotide"
  misc_feature (61)..(61): /note="Nucleotide may be methylated to form 5-methylcytosine"
ggaagtgaaagggattgggcactttttgagcccattcaaagtcccaggcactctgttagacgctttccattcatctcctttaatcctttcaataaccctatgaaacgattggtgtcatctcc

SEQ ID NO: 10525 - DNA, 122 bp, Homo sapiens
  misc_feature (61)..(62): /note="This region represents a CpG dinucleotide"
  misc_feature (61)..(61): /note="Nucleotide may be methylated to form 5-methylcytosine"
tcattgcagttgggagacagggtggggtgtgagacacacagccactgaatttcaaagcaacgtgataatgctagattatctgtaccttttcaaacgtgtatgcctagaacccaggactgtgc

SEQ ID NO: 10526 - DNA, 122 bp, Homo sapiens
  misc_feature (61)..(62): /note="This region represents a CpG dinucleotide"
  misc_feature (61)..(61): /note="Nucleotide may be methylated to form 5-methylcytosine"
gggttgctggggaattaaatgggctcggattctgtctgtgagtgccccaggaggtccacacgcccacagactctgggcctgactcatctgcagggatttatagcaggaatcttcctgcctcc

SEQ ID NO: 10527 - DNA, 122 bp, Homo sapiens
  misc_feature (61)..(62): /note="This region represents a CpG dinucleotide"
  misc_feature (61)..(61): /note="Nucleotide may be methylated to form 5-methylcytosine"
gtgggaaggaaagggagccgagagggctgagccgctgagccggagtccagatgaatgtgccggagtctctgcatttgtgatgggggcgaggtgatgggggcgaggtggccggcgtggctctg

SEQ ID NO: 10528 - DNA, 122 bp, Homo sapiens
  misc_feature (61)..(62): /note="This region represents a CpG dinucleotide"
  misc_feature (61)..(61): /note="Nucleotide may be methylated to form 5-methylcytosine"
ctttatgatgtctgcaaaataaaaggggaatgagtgttattataccaatttttatggacacgggaacctgagcatagtctctacatgagttgccaaagtcatttttctgacacaatccacaa

SEQ ID NO: 10529 - DNA, 122 bp, Homo sapiens
  misc_feature (61)..(62): /note="This region represents a CpG dinucleotide"
  misc_feature (61)..(61): /note="Nucleotide may be methylated to form 5-methylcytosine"
tcagaaagattttttaaagtgtgaagctaagtatgttggattaagtacctaaccttgatacgaggaagtctggtaaaataatttagcattagataggttcagttgctgaggaatgtttctga

SEQ ID NO: 10530 - DNA, 122 bp, Homo sapiens
  misc_feature (61)..(62): /note="This region represents a CpG dinucleotide"
  misc_feature (61)..(61): /note="Nucleotide may be methylated to form 5-methylcytosine"
cctgccctcaattttgttatcatttgattaggatagtttgcttgcctttttccatttgctcgtatgtgatgtgtcatagactgcagtactttccacctgtgtctcatagagaataaaatgag

SEQ ID NO: 10531 - DNA, 122 bp, Homo sapiens
  misc_feature (61)..(62): /note="This region represents a CpG dinucleotide"
  misc_feature (61)..(61): /note="Nucleotide may be methylated to form 5-methylcytosine"
acaaataccacatgatctcactcatacatggtcattcatatattgggcaaacaccaccttcgatgtataatgatggtttggctcatcactctggtcttacaacattatttgatttctacatg

SEQ ID NO: 10532 - DNA, 122 bp, Homo sapiens
  misc_feature (61)..(62): /note="This region represents a CpG dinucleotide"
  misc_feature (61)..(61): /note="Nucleotide may be methylated to form 5-methylcytosine"
ggtggtgtaagcagagtttactgtagaaaccaagaaacaaaagacaacatgaccagttttcgaacttggcgtgctctgaattattaaaaataatcttatagtgtccgcccagccctctcaag

SEQ ID NO: 10533 - DNA, 122 bp, Homo sapiens
  misc_feature (61)..(62): /note="This region represents a CpG dinucleotide"
  misc_feature (61)..(61): /note="Nucleotide may be methylated to form 5-methylcytosine"
gtgaagtatcacatcagaaactagctcagatcaaagggcgtgtgacaactgaggctagaacgctcactgccttagcccagccatagcaccttcggagagcagggctgtctgcacgggacata

SEQ ID NO: 10534 - DNA, 122 bp, Homo sapiens
  misc_feature (61)..(62): /note="This region represents a CpG dinucleotide"
  misc_feature (61)..(61): /note="Nucleotide may be methylated to form 5-methylcytosine"
gatttctcctttcctctgccttgttgttctatgtgggcccccagctgattggatggtgcccgcctacattgagggcagatctttcccactcggtccactgactcacatgccagtctcctctg

SEQ ID NO: 10535 - DNA, 122 bp, Homo sapiens
  misc_feature (61)..(62): /note="This region represents a CpG dinucleotide"
  misc_feature (61)..(61): /note="Nucleotide may be methylated to form 5-methylcytosine"
cggggtggactggaagttacgtcatgcaaatccttcctgtttgggcagtatttgcaaccacgtggcttcacgagtccgccaaaccatcaggtgaataaacgggagaggagaagagagtctag

SEQ ID NO: 10536 - DNA, 122 bp, Homo sapiens
  misc_feature (61)..(62): /note="This region represents a CpG dinucleotide"
  misc_feature (61)..(61): /note="Nucleotide may be methylated to form 5-methylcytosine"
acccagcccccagccctcctagagacagaggctttgcggggggtgtctaatttctgtccccggaaacctctgaccaccaacttccccatttcaggaaaaagcctggtgtgggtggggtgggg

SEQ ID NO: 10537 - DNA, 122 bp, Homo sapiens
  misc_feature (61)..(62): /note="This region represents a CpG dinucleotide"
  misc_feature (61)..(61): /note="Nucleotide may be methylated to form 5-methylcytosine"
cctgcccattggaagaagatggtgagctcttgccccatagcaaaggtcacctctaggaagcggaaagaaacacaagctgacgttatggagaggagttattctacatctcactgccccgataa

SEQ ID NO: 10538 - DNA, 122 bp, Homo sapiens
  misc_feature (61)..(62): /note="This region represents a CpG dinucleotide"
  misc_feature (61)..(61): /note="Nucleotide may be methylated to form 5-methylcytosine"
acaggaaatcctaagatcataaaacaatataaataatgtgtcataattgctgtcagcagccgaactttatatagtaaagctgcagggataatctagatttgggttatggctgtgcttcataa

SEQ ID NO: 10539 - DNA, 122 bp, Homo sapiens
  misc_feature (61)..(62): /note="This region represents a CpG dinucleotide"
  misc_feature (61)..(61): /note="Nucleotide may be methylated to form 5-methylcytosine"
gcagcctcaaaactcgtgatcccactgggtgcctgcaagccccagcctcttggagatgagcgggtaattaagttaatcccagggtttacagtaatgagtgctggagccacaggggaggggac

SEQ ID NO: 10540 - DNA, 122 bp, Homo sapiens
  misc_feature (61)..(62): /note="This region represents a CpG dinucleotide"
  misc_feature (61)..(61): /note="Nucleotide may be methylated to form 5-methylcytosine"
ggtaatctacccgcctgggcctcccaaagtgctgggattataggcgtgagccaccgtgcccggcccaggcattttgaaatacttcagaatgtgtttcaggctgacatcactgaaactcagaa

SEQ ID NO: 10541 - DNA, 122 bp, Homo sapiens
  misc_feature (61)..(62): /note="This region represents a CpG dinucleotide"
  misc_feature (61)..(61): /note="Nucleotide may be methylated to form 5-methylcytosine"
cttaaaatagcctttcttcgaataagtgatacagcaaaaagccataaaggattccttttgcggttggatatgtaaaggtcatagcagcaactgacaagaagtgtgcaatatttacctggatt

SEQ ID NO: 10542 - DNA, 122 bp, Homo sapiens
  misc_feature (61)..(62): /note="This region represents a CpG dinucleotide"
  misc_feature (61)..(61): /note="Nucleotide may be methylated to form 5-methylcytosine"
ctgttatcctggtcacaatgaaagtgtattcattctgggaggtcagccaaccctgtcctacgcacagcacctactactcatgatacaaatgtggtattaggtcatcacgctttggaagctgt

SEQ ID NO: 10543 - DNA, 122 bp, Homo sapiens
  misc_feature (61)..(62): /note="This region represents a CpG dinucleotide"
  misc_feature (61)..(61): /note="Nucleotide may be methylated to form 5-methylcytosine"
ccagggcagcggtgttggcccctcagttagggcagtctctggagctcgggaatgtcattgcgttcccatgcccagcagtgcagctggaactctgggtgctggctctgggcagtctttgctgt

SEQ ID NO: 10544 - DNA, 122 bp, Homo sapiens
  misc_feature (61)..(62): /note="This region represents a CpG dinucleotide"
  misc_feature (61)..(61): /note="Nucleotide may be methylated to form 5-methylcytosine"
tgccctgggaggagggctgatggctactggccttgctgatggtggcccccctggccagcacgccatctgacaggttccttgcagctaaaggtcttgctgggccacccaggtgtgactcactc

SEQ ID NO: 10545 - DNA, 122 bp, Homo sapiens
  misc_feature (61)..(62): /note="This region represents a CpG dinucleotide"
  misc_feature (61)..(61): /note="Nucleotide may be methylated to form 5-methylcytosine"
tggcttttgtgtcactgggtgctcttcctgaggccagctatgggcagattatgaaactgccgcatctgccctttctctccccagcctcacctcatgcctatacggtccttcctcctgtacct

SEQ ID NO: 10546 - DNA, 122 bp, Homo sapiens
  misc_feature (61)..(62): /note="This region represents a CpG dinucleotide"
  misc_feature (61)..(61): /note="Nucleotide may be methylated to form 5-methylcytosine"
aaaaccatgagctctctcatcatccagaaagcttagaatcccagccattaggtcagtggtcgtaaaagacacactctctgttcccaggtcagagcaggcagacttgctaatcttctgggcct

SEQ ID NO: 10547 - DNA, 122 bp, Homo sapiens
  misc_feature (61)..(62): /note="This region represents a CpG dinucleotide"
  misc_feature (61)..(61): /note="Nucleotide may be methylated to form 5-methylcytosine"
gagggccccaaagcctcttaccctctcactgctgctgcttcagccttaggaaggaaagcacggagacagtcccagaatgttgctactactacatagggaagaagatttatgagctgtacagg

SEQ ID NO: 10548 - DNA, 122 bp, Homo sapiens
  misc_feature (61)..(62): /note="This region represents a CpG dinucleotide"
  misc_feature (61)..(61): /note="Nucleotide may be methylated to form 5-methylcytosine"
cacatctaaaagcgttaaacatgcatttctccaccttgtgctataagaacaaagcacatacgctaatattagatgaatcatgattctttcttacttctgcaagagctatcacatatatgaat

SEQ ID NO: 10549 - DNA, 122 bp, Homo sapiens
  misc_feature (61)..(62): /note="This region represents a CpG dinucleotide"
  misc_feature (61)..(61): /note="Nucleotide may be methylated to form 5-methylcytosine"
tgatcatactgattataaaattaagtacagtcattcactgcataacagtgtttgagccaacgatggatcatgtattcagcagtggttccataagattataatagagctaaaaaaattccagt

SEQ ID NO: 10550 - DNA, 122 bp, Homo sapiens
  misc_feature (61)..(62): /note="This region represents a CpG dinucleotide"
  misc_feature (61)..(61): /note="Nucleotide may be methylated to form 5-methylcytosine"
cccagcatcctgctcatcttgctggtaggcaaccactcattcatttctacattcagaaatcgtgggccttctctctctgagagccggtttactgaggtcaggaggcacccacatctgcttca

SEQ ID NO: 10551 - DNA, 122 bp, Homo sapiens
  misc_feature (61)..(62): /note="This region represents a CpG dinucleotide"
  misc_feature (61)..(61): /note="Nucleotide may be methylated to form 5-methylcytosine"
tgaccccgcatggcatgtggtgacctccctccctgtgagcagttgtgactaataaactgccgccaatttcatctgtccagtgtgtcatgccatgtgtctagttatctcctactatttaatgg

SEQ ID NO: 10552 - DNA, 122 bp, Homo sapiens
  misc_feature (61)..(62): /note="This region represents a CpG dinucleotide"
  misc_feature (61)..(61): /note="Nucleotide may be methylated to form 5-methylcytosine"
cattcactctgggggaagccagctcttatgtcatggggacactcaagcagccctatgagccgtcttggaagaaaatgttccagctgagtcaagccttcaggtaactgcagcctcagctgtta

SEQ ID NO: 10553 - DNA, 122 bp, Homo sapiens
  misc_feature (61)..(62): /note="This region represents a CpG dinucleotide"
  misc_feature (61)..(61): /note="Nucleotide may be methylated to form 5-methylcytosine"
tgcaggtcaacatatctcaagctgacatgcaggccattggcaacaccatcacaatggtaacgcaggatggcacgcccatcacagtccccgcccatgatgcagtcatctcctcagcaggaacg

SEQ ID NO: 10554 - DNA, 122 bp, Homo sapiens
  misc_feature (61)..(62): /note="This region represents a CpG dinucleotide"
  misc_feature (61)..(61): /note="Nucleotide may be methylated to form 5-methylcytosine"
tttttaataagcattcaaagacatctgatgccagccatctgcttgccacacgttgagcaacgctactccaggacaagtccttggaggtgcaagatcacaggtttaattgagataaaacggca

SEQ ID NO: 10555 - DNA, 122 bp, Homo sapiens
  misc_feature (61)..(62): /note="This region represents a CpG dinucleotide"
  misc_feature (61)..(61): /note="Nucleotide may be methylated to form 5-methylcytosine"
tgatgatctctaatctgcctaattccagtcccacaagatctatcagcacaaggcctgtcccggtacctaaatttaaaaaagaacctcccttaactgactggatcaggcagcatctcctattc

SEQ ID NO: 10556 - DNA, 122 bp, Homo sapiens
  misc_feature (61)..(62): /note="This region represents a CpG dinucleotide"
  misc_feature (61)..(61): /note="Nucleotide may be methylated to form 5-methylcytosine"
agcaagacagtggatctgagctccatccccgcagtctgcactggccccttcatggcacagcgacagctttgccatcagccggcaagcatgcggggtgtggacgacacagccggagagagcag

SEQ ID NO: 10557 - DNA, 122 bp, Homo sapiens
  misc_feature (61)..(62): /note="This region represents a CpG dinucleotide"
  misc_feature (61)..(61): /note="Nucleotide may be methylated to form 5-methylcytosine"
gtcaaggagggctggctacaggcagagtggatttcataaatcaccatcccctcttaaatgcgtgcttcacctttttactattttaagtatgattttctcaggttaaaaaaacttttccccaa

SEQ ID NO: 10558 - DNA, 122 bp, Homo sapiens
  misc_feature (61)..(62): /note="This region represents a CpG dinucleotide"
  misc_feature (61)..(61): /note="Nucleotide may be methylated to form 5-methylcytosine"
accaccggcatctcttacctctgaataaggcttcctgcaattctcactcaacagagaagccggtttgatctatttaaatccttccatgcttaaaaccagtctaccaagtcccattgtttagg

SEQ ID NO: 10559 - DNA, 122 bp, Homo sapiens
  misc_feature (61)..(62): /note="This region represents a CpG dinucleotide"
  misc_feature (61)..(61): /note="Nucleotide may be methylated to form 5-methylcytosine"
ttctgtgacctgccagcaaatgctggtttaatcttcaggtcctagtaccctgccagcttgcgctgaccaaggggagtgtttatagcttttttgacctgttggtagcttaaagtgatttagcc

SEQ ID NO: 10560 - DNA, 122 bp, Homo sapiens
  misc_feature (61)..(62): /note="This region represents a CpG dinucleotide"
  misc_feature (61)..(61): /note="Nucleotide may be methylated to form 5-methylcytosine"
tcactgcaatactgcactaaccagtgagtgtaagcctgcagcacagccagggactgagcacgtacatcaatgaggtcaggtttcaatactgatggcacatcagtttcaatgttgcacaattt

SEQ ID NO: 10561 - DNA, 122 bp, Homo sapiens
  misc_feature (61)..(62): /note="This region represents a CpG dinucleotide"
  misc_feature (61)..(61): /note="Nucleotide may be methylated to form 5-methylcytosine"
cagaaatacttttaagataaagttgacagcatatgtcaactgcctgattgggactaagaacggtgaggagttactcagttattttgtcatgtggcactgttatcatggcttagctcactaaa

SEQ ID NO: 10562 - DNA, 122 bp, Homo sapiens
  misc_feature (61)..(62): /note="This region represents a CpG dinucleotide"
  misc_feature (61)..(61): /note="Nucleotide may be methylated to form 5-methylcytosine"
aacatggatgaaccttgaggacattatgctgagtcaaacaagccatttctaggccaggcacgctggctcacacctgtaatcccagcactttgggaggccgaggcgggcagatcacttgaggt

SEQ ID NO: 10563 - DNA, 122 bp, Homo sapiens
  misc_feature (61)..(62): /note="This region represents a CpG dinucleotide"
  misc_feature (61)..(61): /note="Nucleotide may be methylated to form 5-methylcytosine"
caaccaaagctctccccttcagcagcagcttgaggcagtcgggctggttgtagagtgctgcgtagtgcagagccgtgttcccgtcagcagccttggcatccaggtgaccactggggagagga

SEQ ID NO: 10564 - DNA, 122 bp, Homo sapiens
  misc_feature (61)..(62): /note="This region represents a CpG dinucleotide"
  misc_feature (61)..(61): /note="Nucleotide may be methylated to form 5-methylcytosine"
attcccatagggaactcccatagggaattccaaacttacaggccagtaaggtggcctggccgctcttccacctggaacacagctcactgaatacggcagatacctgcagactgggggcagaa

SEQ ID NO: 10565 - DNA, 122 bp, Homo sapiens
  misc_feature (61)..(62): /note="This region represents a CpG dinucleotide"
  misc_feature (61)..(61): /note="Nucleotide may be methylated to form 5-methylcytosine"
aaagattaagtaacttgttgaagatgctgtggctactgcacggcaaagttagaattctcacgttgtcaggtccactctgtggctcggttcttaatggtcatgataagtgcacacccaacacc

SEQ ID NO: 10566 - DNA, 122 bp, Homo sapiens
  misc_feature (61)..(62): /note="This region represents a CpG dinucleotide"
  misc_feature (61)..(61): /note="Nucleotide may be methylated to form 5-methylcytosine"
gggctgttgggaggggcaccatggaagggatttggagatggggtaaggccagtgagtcagcgctgggctctagatgcaaggataaggggctgtgtagcatcagagtaaatcacctgtgatgt

SEQ ID NO: 10567 - DNA, 122 bp, Homo sapiens
  misc_feature (61)..(62): /note="This region represents a CpG dinucleotide"
  misc_feature (61)..(61): /note="Nucleotide may be methylated to form 5-methylcytosine"
ggaatgttaatatggttagctgtagtcagacaatattgacattgttgctaagatattttacgagacatgtcattgagactgctgtttggaaaactgagcagtgaatttttttttttttggtg

SEQ ID NO: 10568 - DNA, 122 bp, Homo sapiens
  misc_feature (61)..(62): /note="This region represents a CpG dinucleotide"
  misc_feature (61)..(61): /note="Nucleotide may be methylated to form 5-methylcytosine"
tctttgaaaacagggaatggaggagagtcaagcaggaagagtgattgatcctgtcttgagcgtgttctgcacttgggaaggtaagcttgtcatcaacattgtcagtgtgagatttaacagga

SEQ ID NO: 10569 - DNA, 122 bp, Homo sapiens
  misc_feature (61)..(62): /note="This region represents a CpG dinucleotide"
  misc_feature (61)..(61): /note="Nucleotide may be methylated to form 5-methylcytosine"
tcagctgcatcctgggatgagaaaacacatgggacagagccatagcagactcatagcctacgtgtatcatgagcaagaaatacattgatgacgtaacaactgagattttgggggattgtttg

SEQ ID NO: 10570 - DNA, 122 bp, Homo sapiens
  misc_feature (61)..(62): /note="This region represents a CpG dinucleotide"
  misc_feature (61)..(61): /note="Nucleotide may be methylated to form 5-methylcytosine"
agactggtcgtagtcagccttcacattaactttgagcagggagggaaaaagcagcagacacgaggactgagaggctctagctacatagtctggctcaggcttctctaccgtgaaaaatgatg

SEQ ID NO: 10571 - DNA, 122 bp, Homo sapiens
  misc_feature (61)..(62): /note="This region represents a CpG dinucleotide"
  misc_feature (61)..(61): /note="Nucleotide may be methylated to form 5-methylcytosine"
aacaagaacggcgagcatggttgtaacggccggggatctagcgtgcgcaaagacgacagccgctaggccatttacaggctgccattggcctcacaggtgtctattgttatgatttgtaggtt

SEQ ID NO: 10572 - DNA, 122 bp, Homo sapiens
  misc_feature (61)..(62): /note="This region represents a CpG dinucleotide"
  misc_feature (61)..(61): /note="Nucleotide may be methylated to form 5-methylcytosine"
cagagattctattatcctaattatggtgccagggtcttaaagagggtgtggcagctgtgacgagtcttaatgaactaagccccatgtggcatatgtgtttgttttgttgttgttgttgttga

SEQ ID NO: 10573 - DNA, 122 bp, Homo sapiens
  misc_feature (61)..(62): /note="This region represents a CpG dinucleotide"
  misc_feature (61)..(61): /note="Nucleotide may be methylated to form 5-methylcytosine"
gcagtgcatagagcacttctccagctctgtttaaatacaccattgacttgttgcctatgacgccatcaagagtgttcctacagacacagccagacagctaagtcaggcagagcccaaaatag

SEQ ID NO: 10574 - DNA, 122 bp, Homo sapiens
  misc_feature (61)..(62): /note="This region represents a CpG dinucleotide"
  misc_feature (61)..(61): /note="Nucleotide may be methylated to form 5-methylcytosine"
atttcttcatcttttaaatgaaaataatgatacatatctaaatcatactgcctagcacaccgctaatgctcaaccaaaatctttccttctctacttattaagtcattgtgggcgtatgggaa

SEQ ID NO: 10575 - DNA, 122 bp, Homo sapiens
  misc_feature (61)..(62): /note="This region represents a CpG dinucleotide"
  misc_feature (61)..(61): /note="Nucleotide may be methylated to form 5-methylcytosine"
gttccacaatggcgagtctgaggagagccacgagcagttcctgaaggcgctgcagaacgccgtcaccaccttcgtgaaccgcatgaagagtaaccacatgcggggccgcagcatcaccaatg

SEQ ID NO: 10576 - DNA, 122 bp, Homo sapiens
  misc_feature (61)..(62): /note="This region represents a CpG dinucleotide"
  misc_feature (61)..(61): /note="Nucleotide may be methylated to form 5-methylcytosine"
tccccagtaatgaaatgatcgggcagggatacaaactcaagactttaaatctttctagaacgtcaagctgccatgtcactagaggtgtattttgggacccaaccctgggggcacacccagac

SEQ ID NO: 10577 - DNA, 122 bp, Homo sapiens
  misc_feature (61)..(62): /note="This region represents a CpG dinucleotide"
  misc_feature (61)..(61): /note="Nucleotide may be methylated to form 5-methylcytosine"
ccgcctgcctcggcctgccaaagtgctgggattgcaaagtgtgagccaccacaatcagcgcgatttcagagattattaagggcaggggaaggaatcccttctaagagaagtttggaggaagt

SEQ ID NO: 10578 - DNA, 122 bp, Homo sapiens
  misc_feature (61)..(62): /note="This region represents a CpG dinucleotide"
  misc_feature (61)..(61): /note="Nucleotide may be methylated to form 5-methylcytosine"
cagtaactttgctcggaatgaaaacccagaaggctgactcactgcattctaggtggtgagcgctcagccacagtcctcagctgctgtgcccagtcagtctgaggtcagcaactgatttaaag

SEQ ID NO: 10579 - DNA, 122 bp, Homo sapiens
  misc_feature (61)..(62): /note="This region represents a CpG dinucleotide"
  misc_feature (61)..(61): /note="Nucleotide may be methylated to form 5-methylcytosine"
cctttggggctgggtttgtgtcttccccaggctggccagtgctcctgggtggggtcgcggcggctctgggcgactcctcatttgcagagtcagcacaggcagggcccttcccaacagtggca

SEQ ID NO: 10580 - DNA, 122 bp, Homo sapiens
  misc_feature (61)..(62): /note="This region represents a CpG dinucleotide"
  misc_feature (61)..(61): /note="Nucleotide may be methylated to form 5-methylcytosine"
agtcccgttcctatagcaaccatcgacttggtacagcaacagacagaagatgtcatgccacgcattgagcccagacttccacccaagaaaactaagcaccaggaagaacaggaagatgtgaa

SEQ ID NO: 10581 - DNA, 122 bp, Homo sapiens
  misc_feature (61)..(62): /note="This region represents a CpG dinucleotide"
  misc_feature (61)..(61): /note="Nucleotide may be methylated to form 5-methylcytosine"
cactcaaaatctggtccaagtcctggtgtggtcctgaaactgttgcttgctggtttaagacgagataagtactgaaactgagagtaagtgtatcttaatctgttcaggctactatagaagaa

SEQ ID NO: 10582 - DNA, 122 bp, Homo sapiens
  misc_feature (61)..(62): /note="This region represents a CpG dinucleotide"
  misc_feature (61)..(61): /note="Nucleotide may be methylated to form 5-methylcytosine"
accccagaggaaagtcctgctagcagtttttgtgtattcttccagaaatttgccttgcaacgcgtttgagtatataaataatcccagaaaggatgggccagacactagcagaaactcaccac

SEQ ID NO: 10583 - DNA, 122 bp, Homo sapiens
  misc_feature (61)..(62): /note="This region represents a CpG dinucleotide"
  misc_feature (61)..(61): /note="Nucleotide may be methylated to form 5-methylcytosine"
tgcagcagctggtgagagctgtaggggcattcccagacacatttctcatgacatccttggcgctggtagcatggccagcaccaggccaggatctaaggacctggagggtcagagggccactg

SEQ ID NO: 10584 - DNA, 122 bp, Homo sapiens
  misc_feature (61)..(62): /note="This region represents a CpG dinucleotide"
  misc_feature (61)..(61): /note="Nucleotide may be methylated to form 5-methylcytosine"
tagacttgcttaagagaaaacagacagtagctctcactccagggaacaagactttagtggcgagacaggtagtgacacatcttggcatatgccagggatactccaagatccttgaagatcca

SEQ ID NO: 10585 - DNA, 122 bp, Homo sapiens
  misc_feature (61)..(62): /note="This region represents a CpG dinucleotide"
  misc_feature (61)..(61): /note="Nucleotide may be methylated to form 5-methylcytosine"
tggttcccaataagaaagtgggcctgcagttcctgcagagacagtgctgagctgagtctccgccttgctggggcttgtcctagaggctccagctctggcacagtggttcctggctgctgcca

SEQ ID NO: 10586 - DNA, 122 bp, Homo sapiens
  misc_feature (61)..(62): /note="This region represents a CpG dinucleotide"
  misc_feature (61)..(61): /note="Nucleotide may be methylated to form 5-methylcytosine"
ctgttttgctcaaaaaaaaaaaaaagtctcctggtcaatgaaagctgagctctatggtaccgaaagggagatcaagattcttcaaagattaagtgaattatcccacaatagtatccactcat

SEQ ID NO: 10587 - DNA, 122 bp, Homo sapiens
  misc_feature (61)..(62): /note="This region represents a CpG dinucleotide"
  misc_feature (61)..(61): /note="Nucleotide may be methylated to form 5-methylcytosine"
ttggcaatcttcttcagtgttgtggcctcaatatcaagtacaacaatagcataaagtaggcgcttatttgttgaatgggtgagtgacgaatgaatacataaaatctatttccttagctggtg

SEQ ID NO: 10588 - DNA, 122 bp, Homo sapiens
  misc_feature (61)..(62): /note="This region represents a CpG dinucleotide"
  misc_feature (61)..(61): /note="Nucleotide may be methylated to form 5-methylcytosine"
tggcatttacccttttacaacaatgtcttatgtctgacccgctttaaggattaccttctccgtaaaacctgccctgaactcttgatcttccccaacaaccatgctcctcctccagtccttcc

SEQ ID NO: 10589 - DNA, 122 bp, Homo sapiens
  misc_feature (61)..(62): /note="This region represents a CpG dinucleotide"
  misc_feature (61)..(61): /note="Nucleotide may be methylated to form 5-methylcytosine"
acgttgcataatcagctcaagtaatgctctcattggattccattagaatgtggctctcatcgctcgcctggactgagacttgagaggaggctgttgccagctgacctcaaggtagcaaaaaa

SEQ ID NO: 10590 - DNA, 122 bp, Homo sapiens
  misc_feature (61)..(62): /note="This region represents a CpG dinucleotide"
  misc_feature (61)..(61): /note="Nucleotide may be methylated to form 5-methylcytosine"
ttaagggactttgcttaggaacctgaaactgtgactcagagacaggccagacaatctctgcgcagcagggattgaaagagaaaaagagagagaatcctattcttttgaaacgagattttgag

SEQ ID NO: 10591 - DNA, 122 bp, Homo sapiens
  misc_feature (61)..(62): /note="This region represents a CpG dinucleotide"
  misc_feature (61)..(61): /note="Nucleotide may be methylated to form 5-methylcytosine"
actcgaaaaacaagggccaattaactgaaagtaatccaggactacctccctgaaaagctgcgctctagtcaggagtaggccgaagcggccttctgacacagcatgactcagcaggtttggag

SEQ ID NO: 10592 - DNA, 122 bp, Homo sapiens
  misc_feature (61)..(62): /note="This region represents a CpG dinucleotide"
  misc_feature (61)..(61): /note="Nucleotide may be methylated to form 5-methylcytosine"
taaaattccactaatttacagctgttgttttcaacaatgccctgggcataaactgctctacgagcaattccaatcaaattctagctctcttagaggaatagtttctgaggtcagttagatat

SEQ ID NO: 10593 - DNA, 122 bp, Homo sapiens
  misc_feature (61)..(62): /note="This region represents a CpG dinucleotide"
  misc_feature (61)..(61): /note="Nucleotide may be methylated to form 5-methylcytosine"
agtgatccacccaccttggcctcccaaagtgctgggattacaggtgtgtgccaccgtgcccggctgaatcattattattattgtgactaattgtgacacctgtcctgcaaggccttcaaaaa

SEQ ID NO: 10594 - DNA, 122 bp, Homo sapiens
  misc_feature (61)..(62): /note="This region represents a CpG dinucleotide"
  misc_feature (61)..(61): /note="Nucleotide may be methylated to form 5-methylcytosine"
gagattgcaggacaatggaatgataaaggtccaacacttaaccatcagtggcaagactaacgcaatcttcacaacagcagaaaaacctgaatggcaggcccatcagagggccatggagatgg

SEQ ID NO: 10595 - DNA, 122 bp, Homo sapiens
  misc_feature (61)..(62): /note="This region represents a CpG dinucleotide"
  misc_feature (61)..(61): /note="Nucleotide may be methylated to form 5-methylcytosine"
ggagtattggcggtggataaggatggaaataggagagaggaattccaggcagaggacaagcggcgcctcctgacagaggcaagttgccacctgctgattagttaaggctgtgtggctagccc

SEQ ID NO: 10596 - DNA, 122 bp, Homo sapiens
  misc_feature (61)..(62): /note="This region represents a CpG dinucleotide"
  misc_feature (61)..(61): /note="Nucleotide may be methylated to form 5-methylcytosine"
tcagggtggcaggtcaccagttgactaatggcctcctccaaggtttgctggcagacactgcgttgccatgaaccctattgatcccagaagtttgcctgctgcttagacagtctttgcgggcg

SEQ ID NO: 10597 - DNA, 122 bp, Homo sapiens
  misc_feature (61)..(62): /note="This region represents a CpG dinucleotide"
  misc_feature (61)..(61): /note="Nucleotide may be methylated to form 5-methylcytosine"
tttgtagctctaagaagctaacaggagttttcacaacacaaatggctaatgttagcagcacgccgagttggcagtcctgtcgtctgcctgatcaacaatatgccatgctgttcgagatttat

SEQ ID NO: 10598 - DNA, 122 bp, Homo sapiens
  misc_feature (61)..(62): /note="This region represents a CpG dinucleotide"
  misc_feature (61)..(61): /note="Nucleotide may be methylated to form 5-methylcytosine"
tctgactggagctcatgcaccagcattacagggtttagtaggttagacaaggtcctttggcggagtgaagagaaatagccagggaagctggcaatgactcagggaatcaccagcatggtgat

SEQ ID NO: 10599 - DNA, 122 bp, Homo sapiens
  misc_feature (61)..(62): /note="This region represents a CpG dinucleotide"
  misc_feature (61)..(61): /note="Nucleotide may be methylated to form 5-methylcytosine"
gtccaggcattgcgctcagtccttatcaaccaattcgatacatattaaacctctagtgtacgcgcagctgtgacagatggaagagaaatgaacctgaatttggagtcatgaggcccaggtct

SEQ ID NO: 10600 - DNA, 122 bp, Homo sapiens
  misc_feature (61)..(62): /note="This region represents a CpG dinucleotide"
  misc_feature (61)..(61): /note="Nucleotide may be methylated to form 5-methylcytosine"
tgtgggagatgttctgccctctccccacgctgaagtgcaggtaaagaactccagcactggcgtggtttggagcagaagctctggaaccagactgcctggttttaaatccccatcctattact

SEQ ID NO: 10601 - DNA, 122 bp, Homo sapiens
  misc_feature (61)..(62): /note="This region represents a CpG dinucleotide"
  misc_feature (61)..(61): /note="Nucleotide may be methylated to form 5-methylcytosine"
ttggccaggtggaataacaatttgtgccaccctcagaatgcttcctgcaaaaaaaccatacggctcatggatgagtcagctaaatacgttggtgcaagaggaaaactactgtcacactatag

SEQ ID NO: 10602 - DNA, 122 bp, Homo sapiens
  misc_feature (61)..(62): /note="This region represents a CpG dinucleotide"
  misc_feature (61)..(61): /note="Nucleotide may be methylated to form 5-methylcytosine"
aaaataaaataactgcacctcatgggattatctgatgaaatgtgtgtatcacttgtcaagcgggaagagagatgattcaccaaacacagtgaaacccactgaggttgaaagatgtttgagac

SEQ ID NO: 10603 - DNA, 122 bp, Homo sapiens
  misc_feature (61)..(62): /note="This region represents a CpG dinucleotide"
  misc_feature (61)..(61): /note="Nucleotide may be methylated to form 5-methylcytosine"
ggctgtttggctgttggcattgggtgtttgccttgtgatatacccagaaaaggattcatacgttacatatgatgaagtctggggatgggactggattctgagagtataaagatggcaatgca

SEQ ID NO: 10604 - DNA, 122 bp, Homo sapiens
  misc_feature (61)..(62): /note="This region represents a CpG dinucleotide"
  misc_feature (61)..(61): /note="Nucleotide may be methylated to form 5-methylcytosine"
aggagggagtgagtcatctgagtctgtgaagaattttctaagcaaggcgagcagcaagcacgaaggctctcaggaaggagtgtgcttggtgagttctaagaacaagcaggccagtgtagctg

SEQ ID NO: 10605 - DNA, 122 bp, Homo sapiens
  misc_feature (61)..(62): /note="This region represents a CpG dinucleotide"
  misc_feature (61)..(61): /note="Nucleotide may be methylated to form 5-methylcytosine"
aaggaaaaccagggtacggttatgaaagtaggtaaaaggcatggaggcagagccccagagcgcaggcagaaatgattcacctcaggttacaccagtagttgcagggtcaggctgtggacatc

SEQ ID NO: 10606 - DNA, 122 bp, Homo sapiens
  misc_feature (61)..(62): /note="This region represents a CpG dinucleotide"
  misc_feature (61)..(61): /note="Nucleotide may be methylated to form 5-methylcytosine"
gcctgggcttggccccagtagacatatgagaacaggtgactgccagaaccacccagagggcgggaagcctgctgttgccaggtccaccatgtgaatcacaatgactgcatgaggtcacagaa

SEQ ID NO: 10607 - DNA, 122 bp, Homo sapiens
  misc_feature (61)..(62): /note="This region represents a CpG dinucleotide"
  misc_feature (61)..(61): /note="Nucleotide may be methylated to form 5-methylcytosine"
ctacccctttcttagctgctgctggcttcttcttgccaatgatggagcttttcagttctgcgtgagaaacgggtaggcatgagctaagacaaaggcagctcagaggcagtagctcagtatac

SEQ ID NO: 10608 - DNA, 122 bp, Homo sapiens
  misc_feature (61)..(62): /note="This region represents a CpG dinucleotide"
  misc_feature (61)..(61): /note="Nucleotide may be methylated to form 5-methylcytosine"
cttgatttacagtctagtgaggatttagtcaagttaacaggcaataccttgtaagtgctacgatgtggggcgtgcacagaggactgagggaacacataagattcacatgtcataggttccag

SEQ ID NO: 10609 - DNA, 122 bp, Homo sapiens
  misc_feature (61)..(62): /note="This region represents a CpG dinucleotide"
  misc_feature (61)..(61): /note="Nucleotide may be methylated to form 5-methylcytosine"
tttcagagatggggcagcaggttctcccaggaggagcctgtcagtcccaatgggcgggcacgtggcaaatgaggtggcagggtgcagggtgagggcagattagagttcagtagttgagtctg

SEQ ID NO: 10610 - DNA, 122 bp, Homo sapiens
  misc_feature (61)..(62): /note="This region represents a CpG dinucleotide"
  misc_feature (61)..(61): /note="Nucleotide may be methylated to form 5-methylcytosine"
aagcttcactaaggctgagaagcaacttaagctgtcaggaataggtgttagtactgaggacggggcagctcactctggccccatgtttagactcctgtcttcattgtcctgactcctgaaga

SEQ ID NO: 10611 - DNA, 122 bp, Homo sapiens
  misc_feature (61)..(62): /note="This region represents a CpG dinucleotide"
  misc_feature (61)..(61): /note="Nucleotide may be methylated to form 5-methylcytosine"
agactactctgtttcataacaggaagaatagtcataaatgttgtgataatccagtttttacgtgaagtgtgaaaatcctgaattagcatggtgtctgtagtaacaggagagaaaggatgcaa

SEQ ID NO: 10612 - DNA, 122 bp, Homo sapiens
  misc_feature (61)..(62): /note="This region represents a CpG dinucleotide"
  misc_feature (61)..(61): /note="Nucleotide may be methylated to form 5-methylcytosine"
aagctatgcgctttggaaaaagaagaggttggtttgaaatgagatttttgtcagtctggccgtccttagtgaaacactgaggctgttctgaagagctgtcagaatctcagttgctggcatcc

SEQ ID NO: 10613 - DNA, 122 bp, Homo sapiens
  misc_feature (61)..(62): /note="This region represents a CpG dinucleotide"
  misc_feature (61)..(61): /note="Nucleotide may be methylated to form 5-methylcytosine"
ttagtcatttcacaggagttgctacagcagtacataaagttttattaatattctgattctcgtgtcatagcttttatggcaggaaaggatgaggacatgccccacctgtaacgtagagcaag

SEQ ID NO: 10614 - DNA, 122 bp, Homo sapiens
  misc_feature (61)..(62): /note="This region represents a CpG dinucleotide"
  misc_feature (61)..(61): /note="Nucleotide may be methylated to form 5-methylcytosine"
tgtaccaatgggtggcaataatacattcacccagaataactccacaggagggccttatcccgcctcgccttgcatatgttgaaaccagggcatggtttcctataaaaatgcttactgtgcag

SEQ ID NO: 10615 - DNA, 122 bp, Homo sapiens
  misc_feature (61)..(62): /note="This region represents a CpG dinucleotide"
  misc_feature (61)..(61): /note="Nucleotide may be methylated to form 5-methylcytosine"
acattggagcatcccagtcttaaagggcacatctgatgagttgcagaatcctagagcctgcgtctgtgccgtgacctcccacgcccagttccccggtgcctagcatgtagtaggagctcagt

SEQ ID NO: 10616 - DNA, 122 bp, Homo sapiens
  misc_feature (61)..(62): /note="This region represents a CpG dinucleotide"
  misc_feature (61)..(61): /note="Nucleotide may be methylated to form 5-methylcytosine"
aatattgagtgaaatagtctgatgtaaaagttaacatgtttcttaactgagtcatcattacgaagagtgcatcatactttgctattataaaggaaagttctcaggagccagtaaggggattt

SEQ ID NO: 10617 - DNA, 122 bp, Homo sapiens
  misc_feature (61)..(62): /note="This region represents a CpG dinucleotide"
  misc_feature (61)..(61): /note="Nucleotide may be methylated to form 5-methylcytosine"
ttcagagaagagccagataacaaggtagcagagacagaaaacaggctgcccaagtaactgcgcagatctgcagatctgtctaatcctagagcttgggtatgactggccttgattaagtggaa

SEQ ID NO: 10618 - DNA, 122 bp, Homo sapiens
  misc_feature (61)..(62): /note="This region represents a CpG dinucleotide"
  misc_feature (61)..(61): /note="Nucleotide may be methylated to form 5-methylcytosine"
tcccctgctcgtgaaccttatgctccagtctttggaactaattgctactcctagagagcccgtcactcagaattgctgacactgcttactccactggaaatgtccttcccaccttctctatc

SEQ ID NO: 10619 - DNA, 122 bp, Homo sapiens
  misc_feature (61)..(62): /note="This region represents a CpG dinucleotide"
  misc_feature (61)..(61): /note="Nucleotide may be methylated to form 5-methylcytosine"
acacgtggtaaatacattctgctgaagcctttgcactcctctactacacaagcttagcggcgcagttacaaagagagaagaaatgcagttaggatgactagttcaacacgatatgacttagt

SEQ ID NO: 10620 - DNA, 122 bp, Homo sapiens
  misc_feature (61)..(62): /note="This region represents a CpG dinucleotide"
  misc_feature (61)..(61): /note="Nucleotide may be methylated to form 5-methylcytosine"
caaaaaaaaagagtcactttctaggcttgtcagagagaaagtgggtgtgtccattactcacggtctaacactggggtactgttcagttctgctgacaagttgtatgctgagcagtttttgtc

SEQ ID NO: 10621 - DNA, 122 bp, Homo sapiens
  misc_feature (61)..(62): /note="This region represents a CpG dinucleotide"
  misc_feature (61)..(61): /note="Nucleotide may be methylated to form 5-methylcytosine"
ccttcatttagatggccccataacaaaccagtgcaaagctatcctgagtcatctccatcccgagggattttccggaaggcactttgaaattacataacgacatagatgaaccaatacttaaa

SEQ ID NO: 10622 - DNA, 122 bp, Homo sapiens
  misc_feature (61)..(62): /note="This region represents a CpG dinucleotide"
  misc_feature (61)..(61): /note="Nucleotide may be methylated to form 5-methylcytosine"
gtgcgtctaggctgtggcctgagtcagagccctgctctttgtcgtggctgagtcatgttccgtgatgtggaggcaccgggttttgtgcgtctccttattcagtggacgttggtgctgtttcc

SEQ ID NO: 10623 - DNA, 122 bp, Homo sapiens
  misc_feature (61)..(62): /note="This region represents a CpG dinucleotide"
  misc_feature (61)..(61): /note="Nucleotide may be methylated to form 5-methylcytosine"
cccacacttgactggaaactcatctttctaatccagtgtagtatctccagctcctgcccccgaggtcaggactcaggaaaagtttgtcacgtgaaggagggagggatgctgtatggcttact

SEQ ID NO: 10624 - DNA, 122 bp, Homo sapiens
  misc_feature (61)..(62): /note="This region represents a CpG dinucleotide"
  misc_feature (61)..(61): /note="Nucleotide may be methylated to form 5-methylcytosine"
gtttttcaataaatgacacctgcatgtggctcagaattcaaaaattacagaaaggtatatcgcaaaaacctaccttgtcaaccagttttgcacacatattttaggttcttcagatgacaatg

SEQ ID NO: 10625 - DNA, 122 bp, Homo sapiens
  misc_feature (61)..(62): /note="This region represents a CpG dinucleotide"
  misc_feature (61)..(61): /note="Nucleotide may be methylated to form 5-methylcytosine"
ccactgcattctcttggtgaaagcaagccacagccctatcccacatttaaggagagaggacgacacaagacagaggctactaggatgttaagttcaatgtcacagacccccacaaccacctc

SEQ ID NO: 10626 - DNA, 122 bp, Homo sapiens
  misc_feature (61)..(62): /note="This region represents a CpG dinucleotide"
  misc_feature (61)..(61): /note="Nucleotide may be methylated to form 5-methylcytosine"
ttaccatgataacccatgaatccattaaccaattaatccatgaatgaattaatccactcacgaaggcagactccttatgacctaatctcctcttcaaggccccaccccttaatactgttaca

SEQ ID NO: 10627 - DNA, 122 bp, Homo sapiens
  misc_feature (61)..(62): /note="This region represents a CpG dinucleotide"
  misc_feature (61)..(61): /note="Nucleotide may be methylated to form 5-methylcytosine"
acagatttacatcttgctcagcaagatgagtcctgccatcacatggcttggatgtggtggcgatggccagactgctgtaaatgtggattatcaatcctgtaatgtacaatgccatggaccag

SEQ ID NO: 10628 - DNA, 122 bp, Homo sapiens
  misc_feature (61)..(62): /note="This region represents a CpG dinucleotide"
  misc_feature (61)..(61): /note="Nucleotide may be methylated to form 5-methylcytosine"
tacaaaagaaacaattatcattcaagtatttaatcttctgttcaagaacacacaggacatcgccaaacctaaatttcctttgcatgccagccaactggaatctggtactggcaagttacata

SEQ ID NO: 10629 - DNA, 122 bp, Homo sapiens
  misc_feature (61)..(62): /note="This region represents a CpG dinucleotide"
  misc_feature (61)..(61): /note="Nucleotide may be methylated to form 5-methylcytosine"
agaaaagagagcccggtcttgaggctgctgtaatgagggagacagttcccagtttgtccccgacctgcccttagctcagctctttcagggacctgttggtgtggcctgatggcatggccctg

SEQ ID NO: 10630 - DNA, 122 bp, Homo sapiens
  misc_feature (61)..(62): /note="This region represents a CpG dinucleotide"
  misc_feature (61)..(61): /note="Nucleotide may be methylated to form 5-methylcytosine"
atgacagtggtaaccatctggatgaaggccttcccatgttctagacattgtgccagaatgcgaggtatagtggtgtgagcccagccatagtggcagaaattccctcctcactactttccagc

SEQ ID NO: 10631 - DNA, 122 bp, Homo sapiens
  misc_feature (61)..(62): /note="This region represents a CpG dinucleotide"
  misc_feature (61)..(61): /note="Nucleotide may be methylated to form 5-methylcytosine"
tcctgggcctgcccaggtatctgcaaactcccgggttccacagcaccttgtatttcatgacgatacaaaggagtagctattggggctctatctgctgagggagattcatcagacaccccgat

SEQ ID NO: 10632 - DNA, 122 bp, Homo sapiens
  misc_feature (61)..(62): /note="This region represents a CpG dinucleotide"
  misc_feature (61)..(61): /note="Nucleotide may be methylated to form 5-methylcytosine"
ggacacgcctgcccctgttgttgtgcgtcttagtgtcacttgctccagatacaggtcccacgttgggtcacccagctggcttggtccatcatgtaccaatagatgtcagcagtggagagtgt

SEQ ID NO: 10633 - DNA, 122 bp, Homo sapiens
  misc_feature (61)..(62): /note="This region represents a CpG dinucleotide"
  misc_feature (61)..(61): /note="Nucleotide may be methylated to form 5-methylcytosine"
aactgtctttttgtcttgaaaaatctttttttctgtaatctggttaaatcaacatagaaccgatgagtttgatcctcagataatccagatgactcttcaagataattctgtaacaagactac

SEQ ID NO: 10634 - DNA, 122 bp, Homo sapiens
  misc_feature (61)..(62): /note="This region represents a CpG dinucleotide"
  misc_feature (61)..(61): /note="Nucleotide may be methylated to form 5-methylcytosine"
ctcaggtgatccacccacgttggcctcccgaagtgctgggattacaggcatgagccaccacgcccggccgggaagccaatttataacaagctttcttggtaaacatgggtaattagttgatg

SEQ ID NO: 10635 - DNA, 122 bp, Homo sapiens
  misc_feature (61)..(62): /note="This region represents a CpG dinucleotide"
  misc_feature (61)..(61): /note="Nucleotide may be methylated to form 5-methylcytosine"
attatgtggcaataccgaatggagcatctccagaggacatttctcaatagcaccattgttcgtggtaagtgaatacttcactttttctcctgcttctgtcaagtaattgatcacgaattagc

SEQ ID NO: 10636 - DNA, 122 bp, Homo sapiens
  misc_feature (61)..(62): /note="This region represents a CpG dinucleotide"
  misc_feature (61)..(61): /note="Nucleotide may be methylated to form 5-methylcytosine"
cagtctcctgtcatccccagcagggagctcagagtcaagcccaaagtgtctgtgtgcactcgtggcttccagagatcagcttgaagccaggagttactttgttagcaaagtttagatgtaac

SEQ ID NO: 10637 - DNA, 122 bp, Homo sapiens
  misc_feature (61)..(62): /note="This region represents a CpG dinucleotide"
  misc_feature (61)..(61): /note="Nucleotide may be methylated to form 5-methylcytosine"
tgtgtgtgtgtgtgtgtgtgtgtgtgtgtgtgtgtgtgtgtacgtgcacgtgtgtgtttacgagatgctcttgatgggaagagggattatatactggaatgggtgactcagggagagtgtcc

SEQ ID NO: 10638 - DNA, 122 bp, Homo sapiens
  misc_feature (61)..(62): /note="This region represents a CpG dinucleotide"
  misc_feature (61)..(61): /note="Nucleotide may be methylated to form 5-methylcytosine"
ttagaactgtaaattggatgtccttggcagccttactcattcgtgagcattctaaactatcgtcatgtaacaggaagtctgagaatgaacaaagagaagggaacctaaagacagctctgtcc

SEQ ID NO: 10639 - DNA, 122 bp, Homo sapiens
  misc_feature (61)..(62): /note="This region represents a CpG dinucleotide"
  misc_feature (61)..(61): /note="Nucleotide may be methylated to form 5-methylcytosine"
ggggttgcccaaccagaccagcaggtgactgggagcagaggtctggcctggctggcccctcgcctacatccaggctgtcctgaatcaggtgcccgatccagtccagcaggcagcctcaggaa

SEQ ID NO: 10640 - DNA, 122 bp, Homo sapiens
  misc_feature (61)..(62): /note="This region represents a CpG dinucleotide"
  misc_feature (61)..(61): /note="Nucleotide may be methylated to form 5-methylcytosine"
ccacaggtcaggtggagggtggggcatgggcatcggccaggattgctgtcaccttttctccggagctaccaagatcgttcctgtttctaagcagtcgcaccccagcagcctctctctctcca

SEQ ID NO: 10641 - DNA, 122 bp, Homo sapiens
  misc_feature (61)..(62): /note="This region represents a CpG dinucleotide"
  misc_feature (61)..(61): /note="Nucleotide may be methylated to form 5-methylcytosine"
gcctgggcaacaagagcaaaactctgtctcacacacacacaaaaatagctgggcctgtggcgcgagcctgtaatcccagctactcaggaagctgaggcaggagaatcgtttcagcccgggag

SEQ ID NO: 10642 - DNA, 122 bp, Homo sapiens
  misc_feature (61)..(62): /note="This region represents a CpG dinucleotide"
  misc_feature (61)..(61): /note="Nucleotide may be methylated to form 5-methylcytosine"
ggagtgaaacagtgagagatcctgtttgtagttctgtgcagacaaacccagaaaccagaacgcagacacaccaggacgcaacaggaaaccacaaaggcctgagatctttcaatgtaaatagg

SEQ ID NO: 10643 - DNA, 122 bp, Homo sapiens
  misc_feature (61)..(62): /note="This region represents a CpG dinucleotide"
  misc_feature (61)..(61): /note="Nucleotide may be methylated to form 5-methylcytosine"
aggttgccacatgacattttaatatcacctgcaaacctaaatccagtgagtgcctacagacgacacacttaacagctcagggcatgattcagaggaagcaattttccaaagtgaagataatt

SEQ ID NO: 10644 - DNA, 122 bp, Homo sapiens
  misc_feature (61)..(62): /note="This region represents a CpG dinucleotide"
  misc_feature (61)..(61): /note="Nucleotide may be methylated to form 5-methylcytosine"
caccaggagtctaaaaggtaaatcacccaaattatctaaatctccactcacctgtctgtacgtataatggttgcttcagttaaagcccttgtggctttacatcattaagggagtagatcagc

SEQ ID NO: 10645 - DNA, 122 bp, Homo sapiens
  misc_feature (61)..(62): /note="This region represents a CpG dinucleotide"
  misc_feature (61)..(61): /note="Nucleotide may be methylated to form 5-methylcytosine"
gaatgagtctgccacctctccttgtacctatccactgtgaaacaagggcgttcatgcacacgttactgtaaatgccctggaggccttatgaataatcattggagcagtatctgctgcaagat

SEQ ID NO: 10646 - DNA, 122 bp, Homo sapiens
  misc_feature (61)..(62): /note="This region represents a CpG dinucleotide"
  misc_feature (61)..(61): /note="Nucleotide may be methylated to form 5-methylcytosine"
gcagaccattcccaggaatcagagcagcttgcacattcctgagaagtagccctggcacgtcgtcactaactctagcttgaaattggtggctcttggatgggtgtggtggctcacgcctgtaa

SEQ ID NO: 10647 - DNA, 122 bp, Homo sapiens
  misc_feature (61)..(62): /note="This region represents a CpG dinucleotide"
  misc_feature (61)..(61): /note="Nucleotide may be methylated to form 5-methylcytosine"
tttgtgagggttagtttaaactagttaatacctattaatcactaacctggaacatgcaaacgacaacatgtagcaattctggaagctgaggacatataagggagtgccatagggccatccct

SEQ ID NO: 10648 - DNA, 122 bp, Homo sapiens
  misc_feature (61)..(62): /note="This region represents a CpG dinucleotide"
  misc_feature (61)..(61): /note="Nucleotide may be methylated to form 5-methylcytosine"
aagaggctgttgtgttgggtcaggtaagagactggttttgggacttggcggacagatgagcgagaaagatgacacctgcgtttctgaattaggtgattatacaggctgtcaatcaaggtagg

SEQ ID NO: 10649 - DNA, 122 bp, Homo sapiens
  misc_feature (61)..(62): /note="This region represents a CpG dinucleotide"
  misc_feature (61)..(61): /note="Nucleotide may be methylated to form 5-methylcytosine"
agtatataactcatacaaaaaatatgtgttgactgtctgtttatgtcatctatatgcttccggtgaacagtaagctattagttttttgggagtcaaaaattctatgtggatttttgactgtg

SEQ ID NO: 10650 - DNA, 122 bp, Homo sapiens
  misc_feature (61)..(62): /note="This region represents a CpG dinucleotide"
  misc_feature (61)..(61): /note="Nucleotide may be methylated to form 5-methylcytosine"
tctgcaccctcccttctctgtggtaatagtgagcactctgcttcactggattcatctgaacgccagcaccagcagcctcctgaggaatgcttgtttaagatagtggtaagagaaaaaagcag

SEQ ID NO: 10651 - DNA, 122 bp, Homo sapiens
  misc_feature (61)..(62): /note="This region represents a CpG dinucleotide"
  misc_feature (61)..(61): /note="Nucleotide may be methylated to form 5-methylcytosine"
cctcagtccatccatgcctatcccaaatcttcacttctagtctatgtcatgagtgattagcgagttgtctgtgcaagttgcaaaggttggcagtgtaaaatatcttcattgactttacccgg

SEQ ID NO: 10652 - DNA, 122 bp, Homo sapiens
  misc_feature (61)..(62): /note="This region represents a CpG dinucleotide"
  misc_feature (61)..(61): /note="Nucleotide may be methylated to form 5-methylcytosine"
caaccggagctattgtgaaggtcagaaaacaggagagggaatcttggcaaggaatggagacggagtttgcaaattgcagcttgagtaaatagttatgaatgggactgctattgtgtctccca

SEQ ID NO: 10653 - DNA, 122 bp, Homo sapiens
  misc_feature (61)..(62): /note="This region represents a CpG dinucleotide"
  misc_feature (61)..(61): /note="Nucleotide may be methylated to form 5-methylcytosine"
gcgcccggcctcaaattttgtgattattcatttaaattttgtaatcaaacattagggtgacgtgttggagctgatcccatactgtaggttcaggaaatacagtcattgcagacatcatcatt

SEQ ID NO: 10654 - DNA, 122 bp, Homo sapiens
  misc_feature (61)..(62): /note="This region represents a CpG dinucleotide"
  misc_feature (61)..(61): /note="Nucleotide may be methylated to form 5-methylcytosine"
caggtagggacagagcctaggcccagggctctggtctgtgctggcagccagaagaatggccgagggccaccatcttgcagtagcatagtagggtgtggccatgtatatggtaaatacaatta

SEQ ID NO: 10655 - DNA, 122 bp, Homo sapiens
  misc_feature (61)..(62): /note="This region represents a CpG dinucleotide"
  misc_feature (61)..(61): /note="Nucleotide may be methylated to form 5-methylcytosine"
cttgaagccacacaagagcccaaggtttggagcagattgagcgtatttctctgagtaacacgaagaacaagtttcactgcctggactgagagttgcaaacttgcattcggaatttttttttt

SEQ ID NO: 10656 - DNA, 122 bp, Homo sapiens
  misc_feature (61)..(62): /note="This region represents a CpG dinucleotide"
  misc_feature (61)..(61): /note="Nucleotide may be methylated to form 5-methylcytosine"
acagtgtctgggaagtaggtattcaatgaacaatagataatcttcataattacttaatttcgcctcacagcactgtgtgggaagtcagaattctccattttcaaggctagaagtgaggcaca

SEQ ID NO: 10657 - DNA, 122 bp, Homo sapiens
  misc_feature (61)..(62): /note="This region represents a CpG dinucleotide"
  misc_feature (61)..(61): /note="Nucleotide may be methylated to form 5-methylcytosine"
cttaggtgattcgcccgccttgccctaccaaagtgctgggattacaggcgtgagccactgcgcccagcctgctaatccgtgttctaatccgggatacagagggacattcatggttctggggc

SEQ ID NO: 10658 - DNA, 122 bp, Homo sapiens
  misc_feature (61)..(62): /note="This region represents a CpG dinucleotide"
  misc_feature (61)..(61): /note="Nucleotide may be methylated to form 5-methylcytosine"
tgtgtgttcaggacaggaggactaaggaccaaacaggtttgggaatgacagatcccttgacggaactggctgacaactttgctcaccagtcacagcagggcagcccagggagtgaacagggg

SEQ ID NO: 10659 - DNA, 122 bp, Homo sapiens
  misc_feature (61)..(62): /note="This region represents a CpG dinucleotide"
  misc_feature (61)..(61): /note="Nucleotide may be methylated to form 5-methylcytosine"
ctcaagcgatccacccgcctcagcctcccaaagtgctgggattacaggagtgagccaccacgcctggccatgattagtatttttaaatatgatttggaccagcaaggttgctgctttttgga

SEQ ID NO: 10660 - DNA, 122 bp, Homo sapiens
  misc_feature (61)..(62): /note="This region represents a CpG dinucleotide"
  misc_feature (61)..(61): /note="Nucleotide may be methylated to form 5-methylcytosine"
atgaaatttcagttatagcatgatcctgccaagtgaaaaatagaggcatcaaagggtaagcgtctcattaggatatggagcctggttccaacatcttgggaaaagctgtctacagctgaatg

SEQ ID NO: 10661 - DNA, 122 bp, Homo sapiens
  misc_feature (61)..(62): /note="This region represents a CpG dinucleotide"
  misc_feature (61)..(61): /note="Nucleotide may be methylated to form 5-methylcytosine"
caagccaagttcctatgcccatccacccatataaaacttccttgttcagaaagtcatctgcgcaactggcaaaggcaccagctcagagttttctatttttattcctgtgtgtaatcaatggg

SEQ ID NO: 10662 - DNA, 122 bp, Homo sapiens
  misc_feature (61)..(62): /note="This region represents a CpG dinucleotide"
  misc_feature (61)..(61): /note="Nucleotide may be methylated to form 5-methylcytosine"
gtgaccctgcgaccctgaagctgttcctgagtaacatggagcggctgctgcatgccaaggcgcatgggtaggaggttcagttcggggaacaccctgcagcccgaggaggaagaacggaacac

SEQ ID NO: 10663 - DNA, 122 bp, Homo sapiens
  misc_feature (61)..(62): /note="This region represents a CpG dinucleotide"
  misc_feature (61)..(61): /note="Nucleotide may be methylated to form 5-methylcytosine"
gaaggagtctgaggctgtgtccaggcccccatgggaaacaattagtaacatctactggggcgtagggtcgggtgggggcagcgttagcttgggctatgtacctgccatccccagactagtac

SEQ ID NO: 10664 - DNA, 122 bp, Homo sapiens
  misc_feature (61)..(62): /note="This region represents a CpG dinucleotide"
  misc_feature (61)..(61): /note="Nucleotide may be methylated to form 5-methylcytosine"
tcattctatgagctgatctgtcctgacagctgccaaattagtcctctcattcctggagctcgctttggcactctcacgaatgtttctttcaaagtccactcttcatttaaaacgttgctcag

SEQ ID NO: 10665 - DNA, 122 bp, Homo sapiens
  misc_feature (61)..(62): /note="This region represents a CpG dinucleotide"
  misc_feature (61)..(61): /note="Nucleotide may be methylated to form 5-methylcytosine"
ggctccccagggtgagcctttcctggtccgactcactggcatcaccatgaggaggcctggcggcagctctgccctgtgcacaccgtggtaacctggcaacaggaacatttgccaccctgcaa

SEQ ID NO: 10666 - DNA, 122 bp, Homo sapiens
  misc_feature (61)..(62): /note="This region represents a CpG dinucleotide"
  misc_feature (61)..(61): /note="Nucleotide may be methylated to form 5-methylcytosine"
gacaatgactgaaactattactactcagtctctgcttcttccggaacagctgagcaaaagcgttctgacattgagtcttttaagcctagatcggcattatttcgtctaactgatcaagaagt

SEQ ID NO: 10667 - DNA, 122 bp, Homo sapiens
  misc_feature (61)..(62): /note="This region represents a CpG dinucleotide"
  misc_feature (61)..(61): /note="Nucleotide may be methylated to form 5-methylcytosine"
tctccatccaaaaagggtcacagatacagcgtttggtgaacgagtcacagtggccatggtcggaacagttcagctgacatgctgagagtggcagcaaagggaagaaagtcaacaagactcag

SEQ ID NO: 10668 - DNA, 122 bp, Homo sapiens
  misc_feature (61)..(62): /note="This region represents a CpG dinucleotide"
  misc_feature (61)..(61): /note="Nucleotide may be methylated to form 5-methylcytosine"
ttgccaggcactcagcctgaggacattcactctctcttcaatatcagagcttggtttttacgtttcttcccgtacccctcagctagcacctaatattaactgccttgtcctacaagttctca

SEQ ID NO: 10669 - DNA, 122 bp, Homo sapiens
  misc_feature (61)..(62): /note="This region represents a CpG dinucleotide"
  misc_feature (61)..(61): /note="Nucleotide may be methylated to form 5-methylcytosine"
gagggcatgttggtgagtgtgcctgagtggagagggctgccagtttaagagtatgatagacggagaataaccagtctcttaataagaaggctggctgggagcagtagctcatgcctgtaatc

SEQ ID NO: 10670 - DNA, 122 bp, Homo sapiens
  misc_feature (61)..(62): /note="This region represents a CpG dinucleotide"
  misc_feature (61)..(61): /note="Nucleotide may be methylated to form 5-methylcytosine"
gcgccgtgcgtgaatctgctcgctgatctgctccaggttacgaagggccacggagtagcgcgtcttggcctgagctacctgctgctccagttctgtcaccttggccttgtgctcctgcagag

SEQ ID NO: 10671 - DNA, 122 bp, Homo sapiens
  misc_feature (61)..(62): /note="This region represents a CpG dinucleotide"
  misc_feature (61)..(61): /note="Nucleotide may be methylated to form 5-methylcytosine"
ttaaacaaacaaacaaaagatctgggtgaagaatataccaggcagaggaaacagctagtacgaagaacatagcctggaaatggatttaatgtggtcaaataatagaaagccagtgtgtctat

SEQ ID NO: 10672 - DNA, 122 bp, Homo sapiens
  misc_feature (61)..(62): /note="This region represents a CpG dinucleotide"
  misc_feature (61)..(61): /note="Nucleotide may be methylated to form 5-methylcytosine"
atttttccttgggaatctcccctttcctagtcacacccgtccatacaggtagacaactgtcgacccatgaaaaggaaacacactcctctttgttctccctgaccttagctgtcctcaggata

SEQ ID NO: 10673 - DNA, 122 bp, Homo sapiens
  misc_feature (61)..(62): /note="This region represents a CpG dinucleotide"
  misc_feature (61)..(61): /note="Nucleotide may be methylated to form 5-methylcytosine"
gggagctccacttacgggcagccttggctggtttctgttgagcgtcttcaccgttatctacgagtccagaaacatccagcagagggattgtgcatcgatattgccatcaagatgaaaagaca

SEQ ID NO: 10674 - DNA, 122 bp, Homo sapiens
  misc_feature (61)..(62): /note="This region represents a CpG dinucleotide"
  misc_feature (61)..(61): /note="Nucleotide may be methylated to form 5-methylcytosine"
tcatgtgtctgtggaattgaaccaaagcattgtcccctggtctgaaaaatgcacccatctcgtggcaggagaagccttttcatattactatattcaacttccttcctttttttttcccctgc

SEQ ID NO: 10675 - DNA, 122 bp, Homo sapiens
  misc_feature (61)..(62): /note="This region represents a CpG dinucleotide"
  misc_feature (61)..(61): /note="Nucleotide may be methylated to form 5-methylcytosine"
acacttttctctctgcagcagatccagagccagagctctacctcgatcctttctgccctccgggtttctccagtcagaaattccccatgcagcatgtgctgtgtaatcatcccccctggatc

SEQ ID NO: 10676 - DNA, 122 bp, Homo sapiens
  misc_feature (61)..(62): /note="This region represents a CpG dinucleotide"
  misc_feature (61)..(61): /note="Nucleotide may be methylated to form 5-methylcytosine"
caagactccaggcctctccagcccagtctgtctcctccaactggtcactccatctgtccacgctcttcgggtctgtccctgctcgccagccaaaccacaggtgaaggaagaatgaactcagg

SEQ ID NO: 10677 - DNA, 122 bp, Homo sapiens
  misc_feature (61)..(62): /note="This region represents a CpG dinucleotide"
  misc_feature (61)..(61): /note="Nucleotide may be methylated to form 5-methylcytosine"
tggttctccaagagcaggtagcctgacccctggttaagtgcagactccaggtggctcagccggcacctgatggtcagcagcacacatcagacacgcagctcaaccgtccagttcctccggat

SEQ ID NO: 10678 - DNA, 122 bp, Homo sapiens
  misc_feature (61)..(62): /note="This region represents a CpG dinucleotide"
  misc_feature (61)..(61): /note="Nucleotide may be methylated to form 5-methylcytosine"
acctttggctttaagcctcaagttctacatttttttcttccccgtgtgcaaaggtgctctcgccaacaaagtgaagaggaaagacacactggcaatgaagttgaaccacagacccagtgaac

SEQ ID NO: 10679 - DNA, 122 bp, Homo sapiens
  misc_feature (61)..(62): /note="This region represents a CpG dinucleotide"
  misc_feature (61)..(61): /note="Nucleotide may be methylated to form 5-methylcytosine"
acaagggtgtttagaaacgcggatctccagggctcatgtgcccatttcagagtgcagacacgcagctcacccacagggaagacagagaaagctctgaccccaagagaaaccgacatcataca

SEQ ID NO: 10680 - DNA, 122 bp, Homo sapiens
  misc_feature (61)..(62): /note="This region represents a CpG dinucleotide"
  misc_feature (61)..(61): /note="Nucleotide may be methylated to form 5-methylcytosine"
tggaccgggaggaagagcgggttcaccacctggtcctcacagcctctgatggcggcgacccgccccgatccagcaccgcccacatccaggtgacagtggtggatgtgaatgaccacacgcct

SEQ ID NO: 10681 - DNA, 122 bp, Homo sapiens
  misc_feature (61)..(62): /note="This region represents a CpG dinucleotide"
  misc_feature (61)..(61): /note="Nucleotide may be methylated to form 5-methylcytosine"
atggcaaagttcccaggctggtagctcagaagacacattaaatacaaatgtgctctatggcgcaaaaataaaccacaggaagtagaagtcctaggtctcaaacggaatttctgtgcatagat

SEQ ID NO: 10682 - DNA, 122 bp, Homo sapiens
  misc_feature (61)..(62): /note="This region represents a CpG dinucleotide"
  misc_feature (61)..(61): /note="Nucleotide may be methylated to form 5-methylcytosine"
cagatagatccaaatcaatggcccaaggccatctgattaatctctcacagacactcctttcgtcttcagtccaaggacctgcttatcaggttaaatttaaaagacaaccagcctggttttca

SEQ ID NO: 10683 - DNA, 122 bp, Homo sapiens
  misc_feature (61)..(62): /note="This region represents a CpG dinucleotide"
  misc_feature (61)..(61): /note="Nucleotide may be methylated to form 5-methylcytosine"
cagggagctgaaggcagattctaagagctgggtgtggatgctgcacccctgagcctgggccgcctgggttttgctcagtctgggaagtacttccaaacccactctttgctagtcttttacaa

SEQ ID NO: 10684 - DNA, 122 bp, Homo sapiens
  misc_feature (61)..(62): /note="This region represents a CpG dinucleotide"
  misc_feature (61)..(61): /note="Nucleotide may be methylated to form 5-methylcytosine"
gccccaaaacaactggatgaggacatgtatttatcatccctggattactgatgaagtaaccgtagcacagagacgttaaggagcatgttctgagtgtcactgctgggaagagaaacaggatg

SEQ ID NO: 10685 - DNA, 122 bp, Homo sapiens
  misc_feature (61)..(62): /note="This region represents a CpG dinucleotide"
  misc_feature (61)..(61): /note="Nucleotide may be methylated to form 5-methylcytosine"
actgtctcaaaaaaacaaaaccaaaaaaaaagataaatagattgactccggaaactgaggcgccgagaggtgaggtgccttgcccaatatcacacagcacttactaagtggcacagctggag

SEQ ID NO: 10686 - DNA, 122 bp, Homo sapiens
  misc_feature (61)..(62): /note="This region represents a CpG dinucleotide"
  misc_feature (61)..(61): /note="Nucleotide may be methylated to form 5-methylcytosine"
ctctgatgacaaggcagctgggtgaggctgggtgccacgtgggttggtgagccgacctcacgccttgttgcagaatgccttctggttctgcctggcatggtgcaccttcttcctgatcccca

SEQ ID NO: 10687 - DNA, 122 bp, Homo sapiens
  misc_feature (61)..(62): /note="This region represents a CpG dinucleotide"
  misc_feature (61)..(61): /note="Nucleotide may be methylated to form 5-methylcytosine"
caggagggccccgggggaccttgggcagcccgggaaccagcatggggtagcaggactgaccggctcccggggcaccttggtaatgctgcaggtgtggccagttgatcccctgtggagacagt

SEQ ID NO: 10688 - DNA, 122 bp, Homo sapiens
  misc_feature (61)..(62): /note="This region represents a CpG dinucleotide"
  misc_feature (61)..(61): /note="Nucleotide may be methylated to form 5-methylcytosine"
aaaagagtgagtttgcaaaattctatcaccagacagcctgctttcagatgatgtggacttcgtaacccaaggcttccttcctcctcctctgccggcaggctgattcctgcttaccaccctgt

SEQ ID NO: 10689 - DNA, 122 bp, Homo sapiens
  misc_feature (61)..(62): /note="This region represents a CpG dinucleotide"
  misc_feature (61)..(61): /note="Nucleotide may be methylated to form 5-methylcytosine"
agaaaacataaaggaaatggtaagccactctgtggctggagatcattaactcttatcccccgtcttgccaaattcaagctgtcatgaagcagtgcctggctccagccttcctctcactgatc

SEQ ID NO: 10690 - DNA, 122 bp, Homo sapiens
  misc_feature (61)..(62): /note="This region represents a CpG dinucleotide"
  misc_feature (61)..(61): /note="Nucleotide may be methylated to form 5-methylcytosine"
atctgtgtcccccactctactgccaacacagtggtaggaagggaaggcggcaggcttaggcgaggtcctgcaggctggacaggatctgtcaccattacttagcccaggcccatctctttact

SEQ ID NO: 10691 - DNA, 122 bp, Homo sapiens
  misc_feature (61)..(62): /note="This region represents a CpG dinucleotide"
  misc_feature (61)..(61): /note="Nucleotide may be methylated to form 5-methylcytosine"
aagtgattgagatcacccagggaagcttgctgagtgagaagaggaagtctagggctgagccgtaagcaaatgccaacatccaatgggcagcaggaaggaccctgcaaaacagtgtgagatgc

SEQ ID NO: 10692 - DNA, 122 bp, Homo sapiens
  misc_feature (61)..(62): /note="This region represents a CpG dinucleotide"
  misc_feature (61)..(61): /note="Nucleotide may be methylated to form 5-methylcytosine"
ccataagataagtggtgatctaggtgatctaggtgtgcaaaggtgaaacaaaacgaaagacgcaaacattgtactagtttcaggttttgccaagagcagattggctgccaaggctacttcag

SEQ ID NO: 10693 - DNA, 122 bp, Homo sapiens
  misc_feature (61)..(62): /note="This region represents a CpG dinucleotide"
  misc_feature (61)..(61): /note="Nucleotide may be methylated to form 5-methylcytosine"
ccagggctgagaagagagcctgagcatggcccccagcatcactagggctaagctgcatgtcgctgggcgggccctacgcctctccgagctcacaggctagacctgaccaggcgcactgccca

SEQ ID NO: 10694 - DNA, 122 bp, Homo sapiens
  misc_feature (61)..(62): /note="This region represents a CpG dinucleotide"
  misc_feature (61)..(61): /note="Nucleotide may be methylated to form 5-methylcytosine"
actaataacattttacacatgcatagtactttacagcttacaaagttctcattctagctacgacagctgtgtaaccagttgccctagaacttagtggcatcactatgacgacatcactcagg

SEQ ID NO: 10695 - DNA, 122 bp, Homo sapiens
  misc_feature (61)..(62): /note="This region represents a CpG dinucleotide"
  misc_feature (61)..(61): /note="Nucleotide may be methylated to form 5-methylcytosine"
cacatttctgtagtttcaagacaggagttaacccaagaatgacaaacttccttgacttggcgatttagaaaaaattacggcccagtttggtcagctaagaggcacacccaagaaacagcttt

SEQ ID NO: 10696 - DNA, 122 bp, Homo sapiens
  misc_feature (61)..(62): /note="This region represents a CpG dinucleotide"
  misc_feature (61)..(61): /note="Nucleotide may be methylated to form 5-methylcytosine"
actcagacctacttagtctgggtggggctttgacacaagtgtaagcttctggtgagcgagcgtcaggtgcagccaacgctagaaatttctggcttttgagctctaagaccttgaacaagcct

SEQ ID NO: 10697 - DNA, 122 bp, Homo sapiens
  misc_feature (61)..(62): /note="This region represents a CpG dinucleotide"
  misc_feature (61)..(61): /note="Nucleotide may be methylated to form 5-methylcytosine"
atgatgatgatgatgatgaccacaccagactcagtgccaggcactgctctaagtgctttacgggattatttcacttagtactcacaagaatgctatgggatagtgccaccactatcccaatt

SEQ ID NO: 10698 - DNA, 122 bp, Homo sapiens
  misc_feature (61)..(62): /note="This region represents a CpG dinucleotide"
  misc_feature (61)..(61): /note="Nucleotide may be methylated to form 5-methylcytosine"
tgtcattcattggcatgacaattcagccctctggggtcagactcaattgcacaatgtatacgcatatgacagtatgatctatggagtttctaaagaaatgtgcaggagaagcaggcaaatac

SEQ ID NO: 10699 - DNA, 122 bp, Homo sapiens
  misc_feature (61)..(62): /note="This region represents a CpG dinucleotide"
  misc_feature (61)..(61): /note="Nucleotide may be methylated to form 5-methylcytosine"
ttttcatttttcactggggcctgcaaagtaggtcgctgatcttgaagccatttatgcactcgttgtgatgatggagtctttcttgaatcgtatcagaaacctctgtgaatcagaaggcctgg

SEQ ID NO: 10700 - DNA, 122 bp, Homo sapiens
  misc_feature (61)..(62): /note="This region represents a CpG dinucleotide"
  misc_feature (61)..(61): /note="Nucleotide may be methylated to form 5-methylcytosine"
gctgtggttgcatagggaggatcatgcagggggtggggctatagagcttccaagagattacgtcctgtgtctttagctaccaggatgagtcgagaaagactaccagctgggggcatggctga

SEQ ID NO: 10701 - DNA, 122 bp, Homo sapiens
  misc_feature (61)..(62): /note="This region represents a CpG dinucleotide"
  misc_feature (61)..(61): /note="Nucleotide may be methylated to form 5-methylcytosine"
gtgaggtcagtgggtcacacccagggtagggctgaggtccatgccgcctgccatgccctccgacagtggctcttaatgcctgacttgctgatgcccagaacaaaggttcctaattcttttag

SEQ ID NO: 10702 - DNA, 122 bp, Homo sapiens
  misc_feature (61)..(62): /note="This region represents a CpG dinucleotide"
  misc_feature (61)..(61): /note="Nucleotide may be methylated to form 5-methylcytosine"
aatggcatagagcaattcagtcacttcctttaaggttccaatgaagctgctctttaggaacgcttatttcaaactccctaaggtcaaaatccaggcaccacaagatgcagcatcagccactg

SEQ ID NO: 10703 - DNA, 122 bp, Homo sapiens
  misc_feature (61)..(62): /note="This region represents a CpG dinucleotide"
  misc_feature (61)..(61): /note="Nucleotide may be methylated to form 5-methylcytosine"
agaactcagctgtgtaatttactcatgcacaggaggcactggggaggaaaacggtaattacgcttcaagttgtgaatcctaagggccatccattcaagccaagtagggatgggcagtgatgt

SEQ ID NO: 10704 - DNA, 122 bp, Homo sapiens
  misc_feature (61)..(62): /note="This region represents a CpG dinucleotide"
  misc_feature (61)..(61): /note="Nucleotide may be methylated to form 5-methylcytosine"
gagtgtagaggatgggcgtttctaaccctttaccatataccctttagtactacagtcatgcgtcacttaaggacagggatgcgttctgagaaatgcattgtcaggtgattgcatcattgtac

SEQ ID NO: 10705 - DNA, 122 bp, Homo sapiens
  misc_feature (61)..(62): /note="This region represents a CpG dinucleotide"
  misc_feature (61)..(61): /note="Nucleotide may be methylated to form 5-methylcytosine"
gcagtctcctgaagatgtcacccagattgccctgccatcaccccagggccttgagtcactcgcttctcttggtgtctaggcaggcttgaagaaaatcaaacagtacaaaatcatgcaaattc

SEQ ID NO: 10706 - DNA, 122 bp, Homo sapiens
  misc_feature (61)..(62): /note="This region represents a CpG dinucleotide"
  misc_feature (61)..(61): /note="Nucleotide may be methylated to form 5-methylcytosine"
gttttgggcaaacagggtgacttgacaggtgcagcatgtgctctgtacatacagtggtggcgagggttaagagtggcctccacacagcatcaggtttagtcatgtaagatgtgcttccagga

SEQ ID NO: 10707 - DNA, 122 bp, Homo sapiens
  misc_feature (61)..(62): /note="This region represents a CpG dinucleotide"
  misc_feature (61)..(61): /note="Nucleotide may be methylated to form 5-methylcytosine"
cactttggcgtttagggtatgtccataaagtgagctgtgtttccaaccttcattcacgcccgcatcactcgattcccacaacactcatcacccacaagtgcagctttcaatcggagctgaac

SEQ ID NO: 10708 - DNA, 122 bp, Homo sapiens
  misc_feature (61)..(62): /note="This region represents a CpG dinucleotide"
  misc_feature (61)..(61): /note="Nucleotide may be methylated to form 5-methylcytosine"
aattctccctaacttccagtattcacattcttatgtgattccctcccttgagtatgggcacgactcgtgaattgcttctaacaaatagagtattgcaaaaatgacagaatgtcacttcctgg

SEQ ID NO: 10709 - DNA, 122 bp, Homo sapiens
  misc_feature (61)..(62): /note="This region represents a CpG dinucleotide"
  misc_feature (61)..(61): /note="Nucleotide may be methylated to form 5-methylcytosine"
cgctcagatcagtaatttgtctcctctgatcttgtgggccccacccaggaactgagtcagcgcaagaagacaggttcgactccctatgatttcatccctgaccagtcaccactcctggccca

SEQ ID NO: 10710 - DNA, 122 bp, Homo sapiens
  misc_feature (61)..(62): /note="This region represents a CpG dinucleotide"
  misc_feature (61)..(61): /note="Nucleotide may be methylated to form 5-methylcytosine"
gccatagaaaaacaaggctgagttcagctcagagagcctgacagtagggcacaccctgcccgcaccctggcctccaaggatactcctgtgagtcagagggcttgggattctcccacggattg

SEQ ID NO: 10711 - DNA, 122 bp, Homo sapiens
  misc_feature (61)..(62): /note="This region represents a CpG dinucleotide"
  misc_feature (61)..(61): /note="Nucleotide may be methylated to form 5-methylcytosine"
tcaggggatctgagtaggaggctatgggagagaagtagaggtgtttgattctgtgagagacgacagatggcataatggctagaaaggaaatgtcacagtaggtcatatattgtgtcatgagc

SEQ ID NO: 10712 - DNA, 122 bp, Homo sapiens
  misc_feature (61)..(62): /note="This region represents a CpG dinucleotide"
  misc_feature (61)..(61): /note="Nucleotide may be methylated to form 5-methylcytosine"
taacaaacccactctggtgatgactaattcactcctacaatcacaacattaatccagtcacgagggcagatcccccatgactgcattgcctcttgttaggccctacttcccaacactgttac

SEQ ID NO: 10713 - DNA, 122 bp, Homo sapiens
  misc_feature (61)..(62): /note="This region represents a CpG dinucleotide"
  misc_feature (61)..(61): /note="Nucleotide may be methylated to form 5-methylcytosine"
agagtcagggcatagggagagccccagagccgcgggcatccacccgggtagggcaggaggcgtggaggcaggcacaggctatcctttcgttatgaccagattcagagaaaacgagatgttta

SEQ ID NO: 10714 - DNA, 122 bp, Homo sapiens
  misc_feature (61)..(62): /note="This region represents a CpG dinucleotide"
  misc_feature (61)..(61): /note="Nucleotide may be methylated to form 5-methylcytosine"
ggccttccctaggggaggaggtgaatgcagacacaagtgcactgggtgtgctgtgtgcctcgtgctgtgctaggtcccaaggacatggaaggcccagccctccggcatcctgcaatctggct

SEQ ID NO: 10715 - DNA, 122 bp, Homo sapiens
  misc_feature (61)..(62): /note="This region represents a CpG dinucleotide"
  misc_feature (61)..(61): /note="Nucleotide may be methylated to form 5-methylcytosine"
gggacggtttttagtgtgttttccattcctggctctttaatctttgtaggcatacttctccgccttcccaccacccggattcatagtgtgaattcctgcccggccctgagtcatacccaggc

SEQ ID NO: 10716 - DNA, 122 bp, Homo sapiens
  misc_feature (61)..(62): /note="This region represents a CpG dinucleotide"
  misc_feature (61)..(61): /note="Nucleotide may be methylated to form 5-methylcytosine"
tatgaccacttgcacccgggtctacatgggccagcatgcctccaccaggatgaagagcctcgtctgtcataggaattaaattatcatctcaggcttaattaccagtggcattttctccctga

SEQ ID NO: 10717 - DNA, 122 bp, Homo sapiens
  misc_feature (61)..(62): /note="This region represents a CpG dinucleotide"
  misc_feature (61)..(61): /note="Nucleotide may be methylated to form 5-methylcytosine"
gcattgggaattacagttcaacatgagatttgggtggggacacagagccaaaccatatcacggggttttgccatgtgtcccagtctgatcttgaactaactcctgggctcaagtgatccact

SEQ ID NO: 10718 - DNA, 122 bp, Homo sapiens
  misc_feature (61)..(62): /note="This region represents a CpG dinucleotide"
  misc_feature (61)..(61): /note="Nucleotide may be methylated to form 5-methylcytosine"
ttagtgggaaggcttctggctgcaaagccagtgctctttctgactaattgtgctgctcctcgttcaagtctagggtactggttaaaggcatggattttggaaggacagaccctaagattatt

SEQ ID NO: 10719 - DNA, 122 bp, Homo sapiens
  misc_feature (61)..(62): /note="This region represents a CpG dinucleotide"
  misc_feature (61)..(61): /note="Nucleotide may be methylated to form 5-methylcytosine"
tccctggaggagagtggtgacaaaataaggggtgtgcccacgtgtgatgtgctgaggaggcggacggcagcttgcagatgagcaggtttattccataagaacttaatctcattctgttttct

SEQ ID NO: 10720 - DNA, 122 bp, Homo sapiens
  misc_feature (61)..(62): /note="This region represents a CpG dinucleotide"
  misc_feature (61)..(61): /note="Nucleotide may be methylated to form 5-methylcytosine"
aacttacgcacagctcgagggaagtttcctgtcttaacacgccgagggctgagtgaggagcgcagccgtctacccagcaacctctgcacgtggcttttgaaagacatgagttatgaatgatt

SEQ ID NO: 10721 - DNA, 122 bp, Homo sapiens
  misc_feature (61)..(62): /note="This region represents a CpG dinucleotide"
  misc_feature (61)..(61): /note="Nucleotide may be methylated to form 5-methylcytosine"
cacccagcacaatttgaaacccaacattgatttgtgtgattatttgattaatgtctccctcgcctccaagacagacctcacctaattgagctgaacatctttcccggcctctggcacttaat

SEQ ID NO: 10722 - DNA, 122 bp, Homo sapiens
  misc_feature (61)..(62): /note="This region represents a CpG dinucleotide"
  misc_feature (61)..(61): /note="Nucleotide may be methylated to form 5-methylcytosine"
ctcaagtgatccacccacctcagcctcccaaagtgctgggattacaggtgtgagccactacgcctggccctgtgaggtatttttcagcagctttctagactgacaagagcagctggaagcat

SEQ ID NO: 10723 - DNA, 122 bp, Homo sapiens
  misc_feature (61)..(62): /note="This region represents a CpG dinucleotide"
  misc_feature (61)..(61): /note="Nucleotide may be methylated to form 5-methylcytosine"
tccttgtgccaacaggtcatgagacactgaggtcttaatctaaaagccactgacaaactgcgtgtcactaacaaccttgtgagtgagcctgaggtggatctttctcagtggagccttgagat

SEQ ID NO: 10724 - DNA, 122 bp, Homo sapiens
  misc_feature (61)..(62): /note="This region represents a CpG dinucleotide"
  misc_feature (61)..(61): /note="Nucleotide may be methylated to form 5-methylcytosine"
tgcaaggtcactgactcacccttaacccttcttgtaacatgtcttcttaggcaatcctatcggacagaacccaggataagtcatgcataatttaaagaaatttcataggaattaaaagagat

SEQ ID NO: 10725 - DNA, 122 bp, Homo sapiens
  misc_feature (61)..(62): /note="This region represents a CpG dinucleotide"
  misc_feature (61)..(61): /note="Nucleotide may be methylated to form 5-methylcytosine"
aatgttgggattataggcatgagccaccatgccccaccagagcggtgcatttgtgacaatcgatgaacctacactgacaggtcatgatcacccagagtacatagtcacctctgggttcacac

SEQ ID NO: 10726 - DNA, 122 bp, Homo sapiens
  misc_feature (61)..(62): /note="This region represents a CpG dinucleotide"
  misc_feature (61)..(61): /note="Nucleotide may be methylated to form 5-methylcytosine"
ctcagagaaaggatgaacaggcaaacgattcccaacttcctagagactatctcaaagattcgctggattttagatttctttttaaaagcccagggggttagaaattagggaggttcaagaaa

SEQ ID NO: 10727 - DNA, 122 bp, Homo sapiens
  misc_feature (61)..(62): /note="This region represents a CpG dinucleotide"
  misc_feature (61)..(61): /note="Nucleotide may be methylated to form 5-methylcytosine"
ataaacgaaagctgtccttgacaaattggaacaatgaccactctatctcttatggacatacgtgactgggtgagttccctctcttcttcccacctctgagctgtcttccctgcccttgtatc

SEQ ID NO: 10728 - DNA, 122 bp, Homo sapiens
  misc_feature (61)..(62): /note="This region represents a CpG dinucleotide"
  misc_feature (61)..(61): /note="Nucleotide may be methylated to form 5-methylcytosine"
attttgccattacgggttgatcctgttggcttgtcagtctccaacagttctctatacagacgcaaatgttctggagaggcaggccacaggtcagccccagactgtgaacccagctcaggcag

SEQ ID NO: 10729 - DNA, 122 bp, Homo sapiens
  misc_feature (61)..(62): /note="This region represents a CpG dinucleotide"
  misc_feature (61)..(61): /note="Nucleotide may be methylated to form 5-methylcytosine"
tggggatagtgtgacctgtccaccaggtcctgctacaaattgacagcagatcccaggcctcgtgttagcccaagctgcttctactgtcacattgcagccttctgcaaggatggggtggtact

SEQ ID NO: 10730 - DNA, 122 bp, Homo sapiens
  misc_feature (61)..(62): /note="This region represents a CpG dinucleotide"
  misc_feature (61)..(61): /note="Nucleotide may be methylated to form 5-methylcytosine"
aattgcactgattaagagacagctaaaccctcatgtgaccagtcttgcaagtctctgtttcgggaacaaatgattatgctatgcctgtacagtcaagatactggcaccattaaacatgtcac

SEQ ID NO: 10731 - DNA, 122 bp, Homo sapiens
  misc_feature (61)..(62): /note="This region represents a CpG dinucleotide"
  misc_feature (61)..(61): /note="Nucleotide may be methylated to form 5-methylcytosine"
ccataattcagtcaggtcccactgggttcctcccatgacacatgggaattgtggaagttacgattcaagaggagatttgggtggggccaaatcatatcatatcagccaaaccatatcagctg

SEQ ID NO: 10732 - DNA, 122 bp, Homo sapiens
  misc_feature (61)..(62): /note="This region represents a CpG dinucleotide"
  misc_feature (61)..(61): /note="Nucleotide may be methylated to form 5-methylcytosine"
aaatatttgttaaaatagtggggataattgcacaacattgtgaatataattgaatgcaatcgatgacatagtattgtacacttagaaatgattaagatgggtggggcatggtggctcatgcc

SEQ ID NO: 10733 - DNA, 122 bp, Homo sapiens
  misc_feature (61)..(62): /note="This region represents a CpG dinucleotide"
  misc_feature (61)..(61): /note="Nucleotide may be methylated to form 5-methylcytosine"
aggtacagatcagagactataacatcccctaaggaacttttcagaggttcacacttcatgcgccagactcccttatttcaggataagtatttgacatgctttgttacctgattaaacctgca

SEQ ID NO: 10734 - DNA, 122 bp, Homo sapiens
  misc_feature (61)..(62): /note="This region represents a CpG dinucleotide"
  misc_feature (61)..(61): /note="Nucleotide may be methylated to form 5-methylcytosine"
tggccttatgtcctggaaatccctgggccagcttggaaatccccaggccaggtggcctcacgctgctaagtggcacatagtgtcagtcctgtgagagcttgttaatgccttatagctatcat

SEQ ID NO: 10735 - DNA, 122 bp, Homo sapiens
  misc_feature (61)..(62): /note="This region represents a CpG dinucleotide"
  misc_feature (61)..(61): /note="Nucleotide may be methylated to form 5-methylcytosine"
atgtagctatgagagcatgaaaccgtgcgctcacgccgcacacgagttgggtaaatggagcgcctcattttccagatgtgttacagaaactgtgctggaggatgtgactggccagtgagaca

SEQ ID NO: 10736 - DNA, 122 bp, Homo sapiens
  misc_feature (61)..(62): /note="This region represents a CpG dinucleotide"
  misc_feature (61)..(61): /note="Nucleotide may be methylated to form 5-methylcytosine"
gggtttttgagggatgtacaggagctcccgcaggcccatttcacaacaatgctcagggtacgtgcaaaggcctagcttcactggtagttgtctctgcccaggaacacatggtcagagtccct

SEQ ID NO: 10737 - DNA, 122 bp, Homo sapiens
  misc_feature (61)..(62): /note="This region represents a CpG dinucleotide"
  misc_feature (61)..(61): /note="Nucleotide may be methylated to form 5-methylcytosine"
gggactatctaagagccccagatacacaaaggcaaggcagaatgactggttttccctccgcgccttcctggtggaaccacatgttcatgagatgtattagagcgtgtcacattattcaggta

SEQ ID NO: 10738 - DNA, 122 bp, Homo sapiens
  misc_feature (61)..(62): /note="This region represents a CpG dinucleotide"
  misc_feature (61)..(61): /note="Nucleotide may be methylated to form 5-methylcytosine"
ggaagttgatcctcttatcctgtggatgctatggagaaaactcagctgttagtgccgttacgtgaaaataccactgatcaagactgcttatacttggcagctgggcaaagggaataggatgt

SEQ ID NO: 10739 - DNA, 122 bp, Homo sapiens
  misc_feature (61)..(62): /note="This region represents a CpG dinucleotide"
  misc_feature (61)..(61): /note="Nucleotide may be methylated to form 5-methylcytosine"
atcaagttcctgataaatgttagagttagcctgactcagcatgagcctggcttctcctgccggccggcacaggggtgggtaccatgcacatggtctccccgccctgcctaccatctgctgcc

SEQ ID NO: 10740 - DNA, 122 bp, Homo sapiens
  misc_feature (61)..(62): /note="This region represents a CpG dinucleotide"
  misc_feature (61)..(61): /note="Nucleotide may be methylated to form 5-methylcytosine"
aactctcggtggcgctgctggtggtgcctgagaagtcgctgttgcagtgcttgcatcctccgcatgctaatgaagctgtgatgtcagcaagtcagtcacggcatctggacgtcccatcctgc

SEQ ID NO: 10741 - DNA, 122 bp, Homo sapiens
  misc_feature (61)..(62): /note="This region represents a CpG dinucleotide"
  misc_feature (61)..(61): /note="Nucleotide may be methylated to form 5-methylcytosine"
aggaagaaccggaaacaacctgaatattcacaggaggcaaacgatccgtgacaggacaagcgtgggatggcctcctgtgtggcagaaaggacattcgggacctatgacgcaaacgcaggcgg

SEQ ID NO: 10742 - DNA, 122 bp, Homo sapiens
  misc_feature (61)..(62): /note="This region represents a CpG dinucleotide"
  misc_feature (61)..(61): /note="Nucleotide may be methylated to form 5-methylcytosine"
tccccgctccttaaaactggatgggctctaactgctgtgagtcatagaatttggtagaagcgactgccagtttccaggttcaggtcttaggagtctggcagcttccacttcctgtgtcttgg

SEQ ID NO: 10743 - DNA, 122 bp, Homo sapiens
  misc_feature (61)..(62): /note="This region represents a CpG dinucleotide"
  misc_feature (61)..(61): /note="Nucleotide may be methylated to form 5-methylcytosine"
aaaacacattcctacaacttttatataattccttacttagatattttgattgtgaaaatacgtgaggatcaaactgatagtctcttcaacaggcagacagtggccttgaaaatatagtccaa

SEQ ID NO: 10744 - DNA, 122 bp, Homo sapiens
  misc_feature (61)..(62): /note="This region represents a CpG dinucleotide"
  misc_feature (61)..(61): /note="Nucleotide may be methylated to form 5-methylcytosine"
tcctgaatagttatacctctggctagaccagagtgaatatggtgtgatggtgaagagaaccgctatgtgttggctctgtcagctgagtgagtcactcccactaatcctcagtgttctcacct

SEQ ID NO: 10745 - DNA, 122 bp, Homo sapiens
  misc_feature (61)..(62): /note="This region represents a CpG dinucleotide"
  misc_feature (61)..(61): /note="Nucleotide may be methylated to form 5-methylcytosine"
gcttggaaggctgatccgtacactttctcctttacaatctctgattcatgcaactatcatcgtcaaaaagagattgtggactaggctgggtgtggtggctcaggcctgtaatcccagcactt

SEQ ID NO: 10746 - DNA, 122 bp, Homo sapiens
  misc_feature (61)..(62): /note="This region represents a CpG dinucleotide"
  misc_feature (61)..(61): /note="Nucleotide may be methylated to form 5-methylcytosine"
aaaagtgcaccaggttaaccgccgggtcaggaaggacaggcttgcttccctggaagtctacgcaagcaacctgaatgcctggacaagccagctcaaaggtcaggctgccgtctctgttgagt

SEQ ID NO: 10747 - DNA, 122 bp, Homo sapiens
  misc_feature (61)..(62): /note="This region represents a CpG dinucleotide"
  misc_feature (61)..(61): /note="Nucleotide may be methylated to form 5-methylcytosine"
ctcaattagaatgggagaaatggagaatggttgacagtgtcaatcaaaacacaccagcgacgtgttcttaggagggttgacttctagagggcagatgaacacagcaattaagtgcatgggat

SEQ ID NO: 10748 - DNA, 122 bp, Homo sapiens
  misc_feature (61)..(62): /note="This region represents a CpG dinucleotide"
  misc_feature (61)..(61): /note="Nucleotide may be methylated to form 5-methylcytosine"
ggcctcccaatcgggtgttcccttgaggtcatggtgctgagtgttactcagtctgacagacgagacactgtaggctcaccaaggctaagaaatgtgcagtcagctgggaggggctggacccg

SEQ ID NO: 10749 - DNA, 122 bp, Homo sapiens
  misc_feature (61)..(62): /note="This region represents a CpG dinucleotide"
  misc_feature (61)..(61): /note="Nucleotide may be methylated to form 5-methylcytosine"
ttctcctggttcccctagttcttcctggtaaatggcagaaattgtatctgacgcaatgtgcgcaactttgtcctttgctggattcaggtttctggtcatgggtcagatcactcagtgcctga

SEQ ID NO: 10750 - DNA, 122 bp, Homo sapiens
  misc_feature (61)..(62): /note="This region represents a CpG dinucleotide"
  misc_feature (61)..(61): /note="Nucleotide may be methylated to form 5-methylcytosine"
ttcaaccagctctcctagcccagcttccatgctcttcaaggagacttcccactgaacttccgaatacccttgtgtgaaactgccacaggcagtgaatgtgctcatcagcaaacccaagtatc

SEQ ID NO: 10751 - DNA, 122 bp, Homo sapiens
  misc_feature (61)..(62): /note="This region represents a CpG dinucleotide"
  misc_feature (61)..(61): /note="Nucleotide may be methylated to form 5-methylcytosine"
ataacagactaggaggagtcaccatctggccatcttgcctcatctgtgttttctcctttgcgttgctcaaccactaagccaatgtcacatactttagattttttttgttcaagttgcatctc

SEQ ID NO: 10752 - DNA, 122 bp, Homo sapiens
  misc_feature (61)..(62): /note="This region represents a CpG dinucleotide"
  misc_feature (61)..(61): /note="Nucleotide may be methylated to form 5-methylcytosine"
caggcaggagccccacagctcccctccacaccaattcatctgcacaggaatatgggattgcgaataagaaataagctttattgtgttacacaactgaggcttgggagactgcttgttgcagc

SEQ ID NO: 10753 - DNA, 122 bp, Homo sapiens
  misc_feature (61)..(62): /note="This region represents a CpG dinucleotide"
  misc_feature (61)..(61): /note="Nucleotide may be methylated to form 5-methylcytosine"
caggagtcagcaatgcacagatgaggcccaacagagaattccccatgatgatggggacaccgctcagttgccaccaatgccttcttcagactagttcacaggtcatactatgcaaagccagg

SEQ ID NO: 10754 - DNA, 122 bp, Homo sapiens
  misc_feature (61)..(62): /note="This region represents a CpG dinucleotide"
  misc_feature (61)..(61): /note="Nucleotide may be methylated to form 5-methylcytosine"
cagcagttcccaaatctacctggccagttttcttaaaggctctctcaggacatctcctagcgcaaagctcacagcgtgaagtactattgtagacaataggggctgggcaccacagctcatgc

SEQ ID NO: 10755 - DNA, 122 bp, Homo sapiens
  misc_feature (61)..(62): /note="This region represents a CpG dinucleotide"
  misc_feature (61)..(61): /note="Nucleotide may be methylated to form 5-methylcytosine"
gtagagtggactgtagtttatataattgtgcagggaaatcttggaagatgtaaaaagcaacgtctccaatttataaaagaatcagtgagaatgaggaaataagaaagatgggtgaaaagagg

SEQ ID NO: 10756 - DNA, 122 bp, Homo sapiens
  misc_feature (61)..(62): /note="This region represents a CpG dinucleotide"
  misc_feature (61)..(61): /note="Nucleotide may be methylated to form 5-methylcytosine"
tcccaacatgctgcaaactttttaaagtgaagtgaatgcttccaaggagtttcacatatacgaggtgagggacctgaattcagaatttgtgcagtaaatgcaatggtaagctgggctgtaca

SEQ ID NO: 10757 - DNA, 122 bp, Homo sapiens
  misc_feature (61)..(62): /note="This region represents a CpG dinucleotide"
  misc_feature (61)..(61): /note="Nucleotide may be methylated to form 5-methylcytosine"
tgtgtacatagagccaggattgctggattaagatagcattacaggtaatacaggataagacgacattgcacctcgggtccaggtagtgagaaggttccctgccaccctgttacctggagcgg

SEQ ID NO: 10758 - DNA, 122 bp, Homo sapiens
  misc_feature (61)..(62): /note="This region represents a CpG dinucleotide"
  misc_feature (61)..(61): /note="Nucleotide may be methylated to form 5-methylcytosine"
atcaaggcaagttactttagaaaacactagaatgttttcagtcatgcacaaagtaacttccgggttccttatgtgtctcttacatgtcattactctgagtatttttctgatgttttttaaga

SEQ ID NO: 10759 - DNA, 122 bp, Homo sapiens
  misc_feature (61)..(62): /note="This region represents a CpG dinucleotide"
  misc_feature (61)..(61): /note="Nucleotide may be methylated to form 5-methylcytosine"
caaagtgcccgcagaccccctcaattctcacttgtattcaggtttgtggacacatgcctccgggctcactgcagccacccgtgtggaggaagaggaggaagagggctcgccacgccccagag

SEQ ID NO: 10760 - DNA, 122 bp, Homo sapiens
  misc_feature (61)..(62): /note="This region represents a CpG dinucleotide"
  misc_feature (61)..(61): /note="Nucleotide may be methylated to form 5-methylcytosine"
ctgaagtcagcatggctcaagagtcttacctaagacccatggcaggtcctagctggttgccgctgctgattatttagagcccaagggctgtttagtcagcaggtgatgaatcctgccaggac

SEQ ID NO: 10761 - DNA, 122 bp, Homo sapiens
  misc_feature (61)..(62): /note="This region represents a CpG dinucleotide"
  misc_feature (61)..(61): /note="Nucleotide may be methylated to form 5-methylcytosine"
atgtatattccttacgtctattttcccagggactgactccttttaaataagcatctcaggcgggcgcggtggctcacacctgtaatcccagcactttgcagggcggaggtgggcggatcacc

SEQ ID NO: 10762 - DNA, 122 bp, Homo sapiens
  misc_feature (61)..(62): /note="This region represents a CpG dinucleotide"
  misc_feature (61)..(61): /note="Nucleotide may be methylated to form 5-methylcytosine"
gtgggaaagcactctgcaaactgtcaagttctcctgcaacctgcaggtaagatgccctctcgtgggaggaggaaccgagacccagccttaggggaagggtgccctgggtcagccctacttgc

SEQ ID NO: 10763 - DNA, 122 bp, Homo sapiens
  misc_feature (61)..(62): /note="This region represents a CpG dinucleotide"
  misc_feature (61)..(61): /note="Nucleotide may be methylated to form 5-methylcytosine"
agctggttggccatgtggtgaaagtggatccttcagtcctagtcaagccaccccagctgacgctgcatgcaacagagacaagctgtctccacccaggcctgcccacattgttgttttaaacc

SEQ ID NO: 10764 - DNA, 122 bp, Homo sapiens
  misc_feature (61)..(62): /note="This region represents a CpG dinucleotide"
  misc_feature (61)..(61): /note="Nucleotide may be methylated to form 5-methylcytosine"
ccaaccagatgccacaccttgagcacaggccagactgacacccagtagtgaagggagccacgcatgagtatgtgccctgtatctgcactctcaatcaggagccccaaaggtctacggggtgg

SEQ ID NO: 10765 - DNA, 122 bp, Homo sapiens
  misc_feature (61)..(62): /note="This region represents a CpG dinucleotide"
  misc_feature (61)..(61): /note="Nucleotide may be methylated to form 5-methylcytosine"
cactcataaaaagaccaactttagcaccattttcaatcaagaatattccttgaggccaggcggcgtggctcacacctgtaatcccagcactctgggaggcttggggcgggtggatcacctga

SEQ ID NO: 10766 - DNA, 122 bp, Homo sapiens
  misc_feature (61)..(62): /note="This region represents a CpG dinucleotide"
  misc_feature (61)..(61): /note="Nucleotide may be methylated to form 5-methylcytosine"
tcatttttagagagtccagcctatttttctgtgtatgtggactggagtttgagggtagcacgccttttgcagacagcataatggtggctggagcaattcaagtgaaagaagttacaaaggac

SEQ ID NO: 10767 - DNA, 122 bp, Homo sapiens
  misc_feature (61)..(62): /note="This region represents a CpG dinucleotide"
  misc_feature (61)..(61): /note="Nucleotide may be methylated to form 5-methylcytosine"
ccagctgcttgggatggttctaaattccactcagagccctggaatgtgatgcctccaaggcgccagtcctgtgaatcccttcctggtgctcacagagggacagcggcaggtgtgcagaggcc

SEQ ID NO: 10768 - DNA, 122 bp, Homo sapiens
  misc_feature (61)..(62): /note="This region represents a CpG dinucleotide"
  misc_feature (61)..(61): /note="Nucleotide may be methylated to form 5-methylcytosine"
taatttgctgaacaattaccaaatggccaagattcaaaccacaaggacaattccaaagcccgtgagccttttatacgttgtttaatttccataaatcaccataaacaaaaatcttctttctc

SEQ ID NO: 10769 - DNA, 122 bp, Homo sapiens
  misc_feature (61)..(62): /note="This region represents a CpG dinucleotide"
  misc_feature (61)..(61): /note="Nucleotide may be methylated to form 5-methylcytosine"
aaatgaaattccacctggctggcaggtcagggagcaagttctttcctgtagtgaagggtgcgcctggtttcctctctggacaggggatccatccatattgtatagtgcatttcctggaagtg

SEQ ID NO: 10770 - DNA, 122 bp, Homo sapiens
  misc_feature (61)..(62): /note="This region represents a CpG dinucleotide"
  misc_feature (61)..(61): /note="Nucleotide may be methylated to form 5-methylcytosine"
aaattctgcacaccttttactctagggataaaaataatacgaaagtggaatgccagactccgaatacacacaccaagtggcctggactcttcactgctacctggcatgggggaggggagtgc

SEQ ID NO: 10771 - DNA, 122 bp, Homo sapiens
  misc_feature (61)..(62): /note="This region represents a CpG dinucleotide"
  misc_feature (61)..(61): /note="Nucleotide may be methylated to form 5-methylcytosine"
ggtgatccaccagcctcagccccccaaaatgctgggattataggcatgagccaccgcacccggacaaaagtaagactttttaataatggttttgcaagatcggatgtgtgatgggcaggcac

SEQ ID NO: 10772 - DNA, 122 bp, Homo sapiens
  misc_feature (61)..(62): /note="This region represents a CpG dinucleotide"
  misc_feature (61)..(61): /note="Nucleotide may be methylated to form 5-methylcytosine"
gctatctctagaacagttcaggggaagtataatcttgtgacagagtttgtgtgattccagcgcagtaggttgtaaacaactatgaggaaacaggtcagagaacaagctggcctaatgattaa

SEQ ID NO: 10773 - DNA, 122 bp, Homo sapiens
  misc_feature (61)..(62): /note="This region represents a CpG dinucleotide"
  misc_feature (61)..(61): /note="Nucleotide may be methylated to form 5-methylcytosine"
atgttttccagtgaaaccaatttacttgttcccacttcccatgactcagtactagatattcgggctttctaaactatttttttggcaccaaactcttggaatagtcatctttccttcaagtt

SEQ ID NO: 10774 - DNA, 122 bp, Homo sapiens
  misc_feature (61)..(62): /note="This region represents a CpG dinucleotide"
  misc_feature (61)..(61): /note="Nucleotide may be methylated to form 5-methylcytosine"
agatttttctgtaggaatgtcactgctggtacatgggcaaggcacatacacccacacacacgtgggcaaacacaagctcaagggtgtgtacacgtgttgattcacacataaacaagcaaaca

SEQ ID NO: 10775 - DNA, 122 bp, Homo sapiens
  misc_feature (61)..(62): /note="This region represents a CpG dinucleotide"
  misc_feature (61)..(61): /note="Nucleotide may be methylated to form 5-methylcytosine"
gattatgtcagcaacctgaaggagcttggaagtggattcctcccctgagcctccaggtgacggcccagccattgcacaacatggttgcagcctcatgacacgctgagcagagccaagccagc

SEQ ID NO: 10776 - DNA, 122 bp, Homo sapiens
  misc_feature (61)..(62): /note="This region represents a CpG dinucleotide"
  misc_feature (61)..(61): /note="Nucleotide may be methylated to form 5-methylcytosine"
taagtagtgagtgcttgctatgtgcaagatactatgaggtgcctgggagatgtgagggcacgcagacctggcaagttattgacctctacagacctcagtcaccccataaaaaggggactgga

SEQ ID NO: 10777 - DNA, 122 bp, Homo sapiens
  misc_feature (61)..(62): /note="This region represents a CpG dinucleotide"
  misc_feature (61)..(61): /note="Nucleotide may be methylated to form 5-methylcytosine"
ggttgggtggggcttgcaagtctggtggttgaatcctctgaacaagggtgtccaggggcacggcccatgattttctagtctgcaagtgtgaggatgagtgaaaagaatgttagatgaagcag

SEQ ID NO: 10778 - DNA, 122 bp, Homo sapiens
  misc_feature (61)..(62): /note="This region represents a CpG dinucleotide"
  misc_feature (61)..(61): /note="Nucleotide may be methylated to form 5-methylcytosine"
aaagcctttcctctcagaatggttgtctagaccgtagggctacggggctcagcagtttcccgagtgctctctctacaaaggaggggacattggaaattgtagtgtaggagggtgaacatctc

SEQ ID NO: 10779 - DNA, 122 bp, Homo sapiens
  misc_feature (61)..(62): /note="This region represents a CpG dinucleotide"
  misc_feature (61)..(61): /note="Nucleotide may be methylated to form 5-methylcytosine"
gtgagcctctgaggattcagtgtcccctgcaggtccaaccagttatgaccttggtgtggccgtgtcacaggaagctggagatggaatttctgcagggtgtgctttattgcatagctgcttgg

SEQ ID NO: 10780 - DNA, 122 bp, Homo sapiens
  misc_feature (61)..(62): /note="This region represents a CpG dinucleotide"
  misc_feature (61)..(61): /note="Nucleotide may be methylated to form 5-methylcytosine"
ccttaagtcctggtgctcacctctctttctcttactgggcttttgtgaacagggcactttcgtctgcattaaaaacttgttgaggcaagatacacttttccttcattgattttcttaatggt

SEQ ID NO: 10781 - DNA, 122 bp, Homo sapiens
  misc_feature (61)..(62): /note="This region represents a CpG dinucleotide"
  misc_feature (61)..(61): /note="Nucleotide may be methylated to form 5-methylcytosine"
gatcctcccgccttcgttagaacagcctcttccagatgagcgctgcttcttgtcctcatgcgtcctaagttgcaatgatgatgatgatgatgaccacaccagactcagtgccaggcactgct

SEQ ID NO: 10782 - DNA, 122 bp, Homo sapiens
  misc_feature (61)..(62): /note="This region represents a CpG dinucleotide"
  misc_feature (61)..(61): /note="Nucleotide may be methylated to form 5-methylcytosine"
gagtattcatgaataaggttcttgggttaattcatttttctactctttcttcctttctcccgcaagtccttattaagcacttacctaatgctgtcctaggctcaggggaaacagcaatgagt

SEQ ID NO: 10783 - DNA, 122 bp, Homo sapiens
  misc_feature (61)..(62): /note="This region represents a CpG dinucleotide"
  misc_feature (61)..(61): /note="Nucleotide may be methylated to form 5-methylcytosine"
gagatggtttcaaaaaggaggtcatggacagcagaggcaaatgctgctgagaggttaatacgagaacctaaaaatgtctcctggatttcacaacatgtagatcatcagtgagctcagtggaa

SEQ ID NO: 10784 - DNA, 122 bp, Homo sapiens
  misc_feature (61)..(62): /note="This region represents a CpG dinucleotide"
  misc_feature (61)..(61): /note="Nucleotide may be methylated to form 5-methylcytosine"
tagtcctcaataattttttaagcatataaagagttcttgagaccaaaggtgagaaaaccacggtagcagacaaaacatggggcccttgtcttgatcggttggttggttacttgctttgactt

SEQ ID NO: 10785 - DNA, 122 bp, Homo sapiens
  misc_feature (61)..(62): /note="This region represents a CpG dinucleotide"
  misc_feature (61)..(61): /note="Nucleotide may be methylated to form 5-methylcytosine"
tctctcctccttctgtgtctggtgatggcaaacgtttatctttgctcaggcctgggtgcacgctaacctcggccaaatctctgaatgttcaaacatctgccaaaataccacatttcgacaat

SEQ ID NO: 10786 - DNA, 122 bp, Homo sapiens
  misc_feature (61)..(62): /note="This region represents a CpG dinucleotide"
  misc_feature (61)..(61): /note="Nucleotide may be methylated to form 5-methylcytosine"
acaaacttaagccctcaaatcttctggcatatatgttaaaattatctcctttgtttataccgtccctcccttccagcatttatcttgggaattattcactttttccagatctaatccacacc

SEQ ID NO: 10787 - DNA, 122 bp, Homo sapiens
  misc_feature (61)..(62): /note="This region represents a CpG dinucleotide"
  misc_feature (61)..(61): /note="Nucleotide may be methylated to form 5-methylcytosine"
cccatcattgatgtcatcagtctggataattttgcctaccttgcagcatctgctgaccttcgtggaggtgagttctgctcccgggggtggggctgtagacatgaaaggaggtaggtgaggct

SEQ ID NO: 10788 - DNA, 122 bp, Homo sapiens
  misc_feature (61)..(62): /note="This region represents a CpG dinucleotide"
  misc_feature (61)..(61): /note="Nucleotide may be methylated to form 5-methylcytosine"
acaactgcccataaccctacaaatccttgcaaaacaacagttactcacattctttcttcacggcctacggcatgactggcagttctgcactgttgcccaatcccggatcactaggaaccaga

SEQ ID NO: 10789 - DNA, 122 bp, Homo sapiens
  misc_feature (61)..(62): /note="This region represents a CpG dinucleotide"
  misc_feature (61)..(61): /note="Nucleotide may be methylated to form 5-methylcytosine"
acacagggatggtgttaaaagccatgggatgtgctcatatactgagtgtagctgcagaaacggaaccaaaggctgagccctgagatatttcaacattaggagtcaaagtagagaagaatcga

SEQ ID NO: 10790 - DNA, 122 bp, Homo sapiens
  misc_feature (61)..(62): /note="This region represents a CpG dinucleotide"
  misc_feature (61)..(61): /note="Nucleotide may be methylated to form 5-methylcytosine"
tatgcgggaaatgagcaagcaggcatcatagacaaggaacccagaagcctcagctatgcacgggataaggaagtgactaattgcaaattcagtgctcagaaaaaaaggaaataatttaaatc

SEQ ID NO: 10791 - DNA, 122 bp, Homo sapiens
  misc_feature (61)..(62): /note="This region represents a CpG dinucleotide"
  misc_feature (61)..(61): /note="Nucleotide may be methylated to form 5-methylcytosine"
gatgagccactgaggtaacccaggaagacatcacaaacacagaggccttcgctgcccttccgcagaacaccctgcttgctacccacaaaagcaccctttaatcggccatgagtcacatccat

SEQ ID NO: 10792 - DNA, 122 bp, Homo sapiens
  misc_feature (61)..(62): /note="This region represents a CpG dinucleotide"
  misc_feature (61)..(61): /note="Nucleotide may be methylated to form 5-methylcytosine"
ggttaaaaggcatcttttggcatcgctcaggttctgaggcattagcaaaataatagcactcggcttgtccattgaaactgacagagtctatatacagcaagccctttacaaggcagtcaagt

SEQ ID NO: 10793 - DNA, 122 bp, Homo sapiens
  misc_feature (61)..(62): /note="This region represents a CpG dinucleotide"
  misc_feature (61)..(61): /note="Nucleotide may be methylated to form 5-methylcytosine"
gggaaggtagctcatgagatgaaccagaatgtgcccagaggtgtggcctgggcactttcacgcaggtatgttggtttcagcagccatgtggcaggataccgccagcctagaggggagaaatc

SEQ ID NO: 10794 - DNA, 122 bp, Homo sapiens
  misc_feature (61)..(62): /note="This region represents a CpG dinucleotide"
  misc_feature (61)..(61): /note="Nucleotide may be methylated to form 5-methylcytosine"
cggggggctcaggagctgcatgcacaggtgtgactttgcacatgggtgcccaaacaggtgcgtcctcccaggtgtgcacccacagatgtgtcctcacgggcgtgtgcctgcaggtgtgtcct

SEQ ID NO: 10795 - DNA, 122 bp, Homo sapiens
  misc_feature (61)..(62): /note="This region represents a CpG dinucleotide"
  misc_feature (61)..(61): /note="Nucleotide may be methylated to form 5-methylcytosine"
tcgttctgacttctgagctgcgaggtgagctctgtggtcagctgcactgtggcgtatgctcgctgtcattcagctgacatttcagctgctcccaaagtcaacatttatgagttctgccatgt

SEQ ID NO: 10796 - DNA, 122 bp, Homo sapiens
  misc_feature (61)..(62): /note="This region represents a CpG dinucleotide"
  misc_feature (61)..(61): /note="Nucleotide may be methylated to form 5-methylcytosine"
tgcacacccacgaacctgtgggggtacccacacctccacctggcctcccagacccttgaccgcaggggctctccacccagcctagcccctggcaccagagccctggcccagctccaggtttt

SEQ ID NO: 10797 - DNA, 122 bp, Homo sapiens
  misc_feature (61)..(62): /note="This region represents a CpG dinucleotide"
  misc_feature (61)..(61): /note="Nucleotide may be methylated to form 5-methylcytosine"
ctgttggatatgatctcagtcattctagcaataacatggtcatttaaagttgtttttctacgtctagccaaaactggcctcctgtaactgccagctattggtgttagttctaattttgagaa

SEQ ID NO: 10798 - DNA, 122 bp, Homo sapiens
  misc_feature (61)..(62): /note="This region represents a CpG dinucleotide"
  misc_feature (61)..(61): /note="Nucleotide may be methylated to form 5-methylcytosine"
ccatcccggagttctcctgctccccacctcctgtcgtcctgcctggcctccagcccgagtcgtcatccccggagtccctatacagaggtcctgccatggaaccttcccctccccgtgcgctc

SEQ ID NO: 10799 - DNA, 122 bp, Homo sapiens
  misc_feature (61)..(62): /note="This region represents a CpG dinucleotide"
  misc_feature (61)..(61): /note="Nucleotide may be methylated to form 5-methylcytosine"
aactcagacaaccttgcaattcctgcctatggatgacacggcaccagaaatgagctgatccgccctctgaggacaccccaggtaacctgacaaggagagtctagagcaacgtgttttgagca

SEQ ID NO: 10800 - DNA, 122 bp, Homo sapiens
  misc_feature (61)..(62): /note="This region represents a CpG dinucleotide"
  misc_feature (61)..(61): /note="Nucleotide may be methylated to form 5-methylcytosine"
tgccttgcagagtgaggattactgacagaataactgtaaagtcctgacacataggacatacgcaataagttagaactatggtgaagattataaaatgataccgtgtcccaggctctgttatc

SEQ ID NO: 10801 - DNA, 122 bp, Homo sapiens
  misc_feature (61)..(62): /note="This region represents a CpG dinucleotide"
  misc_feature (61)..(61): /note="Nucleotide may be methylated to form 5-methylcytosine"
ccaagggccccaggagtctggcctcaaacctgtccaacctgtaggatcccaggccagggacgagacctggggctgcttcttcaaggtctgagccccaggtgtgggccaagagggccccaact

SEQ ID NO: 10802 - DNA, 122 bp, Homo sapiens
  misc_feature (61)..(62): /note="This region represents a CpG dinucleotide"
  misc_feature (61)..(61): /note="Nucleotide may be methylated to form 5-methylcytosine"
tcagaaaaaggaggggcgacaaaggaaaataattaggctgtagcctcaattgtgcattcccgtgcaaggtgccctgactcgccacagcggtaacagttgacttcacttgtcttgctgcagtt

SEQ ID NO: 10803 - DNA, 122 bp, Homo sapiens
  misc_feature (61)..(62): /note="This region represents a CpG dinucleotide"
  misc_feature (61)..(61): /note="Nucleotide may be methylated to form 5-methylcytosine"
cctgggatatgcaccagatcacattcacaagagaacctaccatgggtgtgtccagcgtcacgcacaattctcagtgaaacagcttaatctccacacttttctgtctcacaagcaaattagga

SEQ ID NO: 10804 - DNA, 122 bp, Homo sapiens
  misc_feature (61)..(62): /note="This region represents a CpG dinucleotide"
  misc_feature (61)..(61): /note="Nucleotide may be methylated to form 5-methylcytosine"
cctatagtttgtggtgacagggagcagggtaagacagtagggatgaatgctgaagtagagcggaagaggttgttaaagatgaagaaatcaagaaactgagaagcccaggactaggagagatt

SEQ ID NO: 10805 - DNA, 122 bp, Homo sapiens
  misc_feature (61)..(62): /note="This region represents a CpG dinucleotide"
  misc_feature (61)..(61): /note="Nucleotide may be methylated to form 5-methylcytosine"
tcaatctctttgttcatatgcacaggctcttaatctctgttttccctttctttagagtaccgtagtctcagatgataaacttctctgaagctaatttcttcactgctgccctggagtgtctc

SEQ ID NO: 10806 - DNA, 122 bp, Homo sapiens
  misc_feature (61)..(62): /note="This region represents a CpG dinucleotide"
  misc_feature (61)..(61): /note="Nucleotide may be methylated to form 5-methylcytosine"
cagttctgaagctctatggttgtaagcctcgccttggcttgactgcacggctttaaagtacgaatctgttcacaggttgtccatgattaaaagccacacctgggccgagcacagtggctcac

SEQ ID NO: 10807 - DNA, 122 bp, Homo sapiens
  misc_feature (61)..(62): /note="This region represents a CpG dinucleotide"
  misc_feature (61)..(61): /note="Nucleotide may be methylated to form 5-methylcytosine"
aatgcagattctgattcagtaggctggggatgggacttgagactgcatttccagcaagctcgcagatgactggatcctgctgtcttcaggctgcatgcttcaaggggtcattcgcaggtgtt

SEQ ID NO: 10808 - DNA, 122 bp, Homo sapiens
  misc_feature (61)..(62): /note="This region represents a CpG dinucleotide"
  misc_feature (61)..(61): /note="Nucleotide may be methylated to form 5-methylcytosine"
atgccttgcattactgcttgcaaacagccatgaccgttgggctttaaagccctgcctccacgctgtctcagctttagacagctgacttcagagccactcatctgctgctcagcagctgggta

SEQ ID NO: 10809 - DNA, 122 bp, Homo sapiens
  misc_feature (61)..(62): /note="This region represents a CpG dinucleotide"
  misc_feature (61)..(61): /note="Nucleotide may be methylated to form 5-methylcytosine"
ggtgaatgaatgagtaggtgctgggtgtgctctttcaacgtgatggtcacaggccacatgcggctatggggcacttgacatgtgacaaagaaactgaatatctcatttgattttattttaaa

SEQ ID NO: 10810 - DNA, 122 bp, Homo sapiens
  misc_feature (61)..(62): /note="This region represents a CpG dinucleotide"
  misc_feature (61)..(61): /note="Nucleotide may be methylated to form 5-methylcytosine"
gttgtcttttctcttgcttggttggggctgcggtgagagtgtctctgaggcatactttcccgcctctcttacgctaggatctgcacacctcctctcaaacactcttctgagcacgctcagcg

SEQ ID NO: 10811 - DNA, 122 bp, Homo sapiens
  misc_feature (61)..(62): /note="This region represents a CpG dinucleotide"
  misc_feature (61)..(61): /note="Nucleotide may be methylated to form 5-methylcytosine"
ctatgggattctcatgtaggtggaaatgcttgagtgggcgcctctggcctttggtctacacgcactagcctgatacacgtctcctccaccaggctgtaaacctcgtgaagtatcggttttat

SEQ ID NO: 10812 - DNA, 122 bp, Homo sapiens
  misc_feature (61)..(62): /note="This region represents a CpG dinucleotide"
  misc_feature (61)..(61): /note="Nucleotide may be methylated to form 5-methylcytosine"
atatactcttttgatctttcaggacttgtgtctcatactctaatgactcttcaaggatcacgttttgaacacacaaacacaaatctctgaacgtacaggaagaaagaggggaagatatcaca

SEQ ID NO: 10813 - DNA, 122 bp, Homo sapiens
  misc_feature (61)..(62): /note="This region represents a CpG dinucleotide"
  misc_feature (61)..(61): /note="Nucleotide may be methylated to form 5-methylcytosine"
acattgcacagtcatagtaatgaggtaagatcttccgtgtaaagtgactgtatggtccagcgtgtggcaagctctccatgagtaacagctgttgctatttcagctccaccagatgctgtgtc

SEQ ID NO: 10814 - DNA, 122 bp, Homo sapiens
  misc_feature (61)..(62): /note="This region represents a CpG dinucleotide"
  misc_feature (61)..(61): /note="Nucleotide may be methylated to form 5-methylcytosine"
tctctgtaagagttattgcatggatgctgcttctaggggcaggcaggcaggcaggcaaaccgtgctacatatttttaagaatgtcactggggaggaaaagaaagctctctttagacactacc

SEQ ID NO: 10815 - DNA, 122 bp, Homo sapiens
  misc_feature (61)..(62): /note="This region represents a CpG dinucleotide"
  misc_feature (61)..(61): /note="Nucleotide may be methylated to form 5-methylcytosine"
tcttcaatgtagcatccttccagaaatagtcttctgaacttggctgcttctattcattcacgcatacatacattttactgtcaggagcaccttctatatgccaaacactaagctacgtgttt

SEQ ID NO: 10816 - DNA, 122 bp, Homo sapiens
  misc_feature (61)..(62): /note="This region represents a CpG dinucleotide"
  misc_feature (61)..(61): /note="Nucleotide may be methylated to form 5-methylcytosine"
gttctttttattattgttattattacatctctgatagggagtccagttttcttgattttgcgatagccaataataattgagggagttttataatgattcagcatgggaaaatcagagttaag

SEQ ID NO: 10817 - DNA, 122 bp, Homo sapiens
  misc_feature (61)..(62): /note="This region represents a CpG dinucleotide"
  misc_feature (61)..(61): /note="Nucleotide may be methylated to form 5-methylcytosine"
tgcataatcctttgatccttatgggttgagtggtggcatctctcttgacatgcagggaaacggatgttctttgatcttgggtctacagtgacagagctgacatctgaatccagcatttttct

SEQ ID NO: 10818 - DNA, 122 bp, Homo sapiens
  misc_feature (61)..(62): /note="This region represents a CpG dinucleotide"
  misc_feature (61)..(61): /note="Nucleotide may be methylated to form 5-methylcytosine"
cattatccaaacaggtttggcacagggcgtctcaatgagtgggcttagagcaagcagacacgagtttcagaaggtcatgctgtgactaggaagttgtcactctggcatatctgcacagtcca

SEQ ID NO: 10819 - DNA, 122 bp, Homo sapiens
  misc_feature (61)..(62): /note="This region represents a CpG dinucleotide"
  misc_feature (61)..(61): /note="Nucleotide may be methylated to form 5-methylcytosine"
cctctctacctgtgtttctgaagggcggtgattaatctcagagatgggatgagcacagagcgccaagtgccccaggatagggcaaggcctacattgagccatgcccagcctctcctactaaa

SEQ ID NO: 10820 - DNA, 122 bp, Homo sapiens
  misc_feature (61)..(62): /note="This region represents a CpG dinucleotide"
  misc_feature (61)..(61): /note="Nucleotide may be methylated to form 5-methylcytosine"
taattcagtttagcacaccaatatttttaaggtctcttctgaactctggcactagttacccgagttcagaaaaagggaaatgctactactgttgactcatccaatgccactactataatcac

SEQ ID NO: 10821 - DNA, 122 bp, Homo sapiens
  misc_feature (61)..(62): /note="This region represents a CpG dinucleotide"
  misc_feature (61)..(61): /note="Nucleotide may be methylated to form 5-methylcytosine"
caccaagtggctttcttccctggtttgcttttaaattctggctttgccactgtctaattccgtgacatcagacaaaactggtaactttttgaagcctcacctgtaaaatggaattaataata

SEQ ID NO: 10822 - DNA, 122 bp, Homo sapiens
  misc_feature (61)..(62): /note="This region represents a CpG dinucleotide"
  misc_feature (61)..(61): /note="Nucleotide may be methylated to form 5-methylcytosine"
cactcacgttctgtaggttgacaccctcaccaagaagttaccagagagctgcaaaccagccgtgctccccagagcatagcccccgcccctccaaatgccagcaccactaggtaatacaaggg

SEQ ID NO: 10823 - DNA, 122 bp, Homo sapiens
  misc_feature (61)..(62): /note="This region represents a CpG dinucleotide"
  misc_feature (61)..(61): /note="Nucleotide may be methylated to form 5-methylcytosine"
attagcccagggctagttctgaaagtcaaactctgcctggcagaagtaggtgaatgacagcgatcagaggacattgatttttgccagctcttacatgagtcataaatgtgatgatatttgtg

SEQ ID NO: 10824 - DNA, 122 bp, Homo sapiens
  misc_feature (61)..(62): /note="This region represents a CpG dinucleotide"
  misc_feature (61)..(61): /note="Nucleotide may be methylated to form 5-methylcytosine"
ataagtacctactccggaaggcaaattatctttccacaccagaaaggtttataaacaagccgggtgtggtggctcacgcctgtaatcccggcactctgggagggcgaggcgggaggatcgct

SEQ ID NO: 10825 - DNA, 122 bp, Homo sapiens
  misc_feature (61)..(62): /note="This region represents a CpG dinucleotide"
  misc_feature (61)..(61): /note="Nucleotide may be methylated to form 5-methylcytosine"
ctgtgccaacaatgatgccaagtacttaacctgaaggagctctttgagttctcataacatcgttacttgttgattattattaataacctccattttaccaaaaacgtctctgaggctcagag

SEQ ID NO: 10826 - DNA, 122 bp, Homo sapiens
  misc_feature (61)..(62): /note="This region represents a CpG dinucleotide"
  misc_feature (61)..(61): /note="Nucleotide may be methylated to form 5-methylcytosine"
gaaggaagggaactggaacaagctctgacactttcaaacagctggaatgcatggtgtgcacgcagtcagcctgaggaggtgtggaggatgagctaagggctcagaaacctttaggggagcag

SEQ ID NO: 10827 - DNA, 122 bp, Homo sapiens
  misc_feature (61)..(62): /note="This region represents a CpG dinucleotide"
  misc_feature (61)..(61): /note="Nucleotide may be methylated to form 5-methylcytosine"
gatggggacacagagccagaccatattaagcacttaaaacagcattctggttgattcttacgcatgttatgttggctacctatcaagagatggagcggagagacacaaacatggatataaag

SEQ ID NO: 10828 - DNA, 122 bp, Homo sapiens
  misc_feature (61)..(62): /note="This region represents a CpG dinucleotide"
  misc_feature (61)..(61): /note="Nucleotide may be methylated to form 5-methylcytosine"
tgtctgctgttttctgctgcctccaaactacttcttgccagactgcatcttcttcccatgcgttggtattttcttgccaagtagctaagtcacctacatcaggtgactgatgagtaaaaggc

SEQ ID NO: 10829 - DNA, 122 bp, Homo sapiens
  misc_feature (61)..(62): /note="This region represents a CpG dinucleotide"
  misc_feature (61)..(61): /note="Nucleotide may be methylated to form 5-methylcytosine"
attgaaataaatacaatttcaaattctgctgccccattaaagattgcttttatttatttgcgggtttgagatgaagaaatagttggaagaggctggaaataggaactgagactcgccttctc

SEQ ID NO: 10830 - DNA, 122 bp, Homo sapiens
  misc_feature (61)..(62): /note="This region represents a CpG dinucleotide"
  misc_feature (61)..(61): /note="Nucleotide may be methylated to form 5-methylcytosine"
cccaggctgtcaggaagcctgcagggagggccccaggccactcacctcctcttgcagggccgagagctcaggccacatccagcttggcctttgcacaagctggtctgccagtctggcagctg

SEQ ID NO: 10831 - DNA, 122 bp, Homo sapiens
  misc_feature (61)..(62): /note="This region represents a CpG dinucleotide"
  misc_feature (61)..(61): /note="Nucleotide may be methylated to form 5-methylcytosine"
ctggctgaggttgtgcctctatctggttatcagttgcctgcagctctttctgattttgttcgtgaacaagggcccttagggaagcctcccgctgttggaaacagcagcagcatcacccagag

SEQ ID NO: 10832 - DNA, 122 bp, Homo sapiens
  misc_feature (61)..(62): /note="This region represents a CpG dinucleotide"
  misc_feature (61)..(61): /note="Nucleotide may be methylated to form 5-methylcytosine"
tgttgtgcttctaaggtagagaagacaattctgtgaccaatggatcagagatcagaagagcgattcaacaactcactctagggataacttagggcagtcccttatgcaccagcagcttctgt

SEQ ID NO: 10833 - DNA, 122 bp, Homo sapiens
  misc_feature (61)..(62): /note="This region represents a CpG dinucleotide"
  misc_feature (61)..(61): /note="Nucleotide may be methylated to form 5-methylcytosine"
gcattcgatgctgtttctaagctggcctcctccctggccctctgcatctcagcagagcagcggttccatctccacactgagacttgcctttgagtatcgcatcacacacctccaccggttcc

SEQ ID NO: 10834 - DNA, 122 bp, Homo sapiens
  misc_feature (61)..(62): /note="This region represents a CpG dinucleotide"
  misc_feature (61)..(61): /note="Nucleotide may be methylated to form 5-methylcytosine"
tgcttatatttgaacaaatagcaaaagctagaaagcctcaacatgctgggagaaagtttccgtcccttgggtgctttacatgttatccctgtggcaatgaatcatgctaggatttcaaccaa

SEQ ID NO: 10835 - DNA, 122 bp, Homo sapiens
  misc_feature (61)..(62): /note="This region represents a CpG dinucleotide"
  misc_feature (61)..(61): /note="Nucleotide may be methylated to form 5-methylcytosine"
tcgtccaactttctcgaatgtttggatgaaaacaaatgactctgtcacctttggcattagcgatgtttgacacatctgagtgtgtcagccttgtttacagtcctgtcctgaccaacaactgc

SEQ ID NO: 10836 - DNA, 122 bp, Homo sapiens
  misc_feature (61)..(62): /note="This region represents a CpG dinucleotide"
  misc_feature (61)..(61): /note="Nucleotide may be methylated to form 5-methylcytosine"
acctcaaatgatccacccacctcagcctcccaaagtgctgggattacaggcgtgagccaccgcgcccggccaggtctgcctatcttctgtgctgtgattctgcctggaagaagatggctgtt

SEQ ID NO: 10837 - DNA, 122 bp, Homo sapiens
  misc_feature (61)..(62): /note="This region represents a CpG dinucleotide"
  misc_feature (61)..(61): /note="Nucleotide may be methylated to form 5-methylcytosine"
ttgtattttaattatatatacacatttaaaatgcagtagtcacttttgtcactgtttaaacgtttggtgtttgtgtcaccgtgccccatgcttgccctccagtgctctccattggttctcca

SEQ ID NO: 10838 - DNA, 122 bp, Homo sapiens
  misc_feature (61)..(62): /note="This region represents a CpG dinucleotide"
  misc_feature (61)..(61): /note="Nucleotide may be methylated to form 5-methylcytosine"
ggctgcttcagcaggagtttgagcaggtgacctttccagttcagctatgctgtatgcctgcgtcagagattcagggttctccaaggcctctttgaatatctggaggctggaaacaggtttga

SEQ ID NO: 10839 - DNA, 122 bp, Homo sapiens
  misc_feature (61)..(62): /note="This region represents a CpG dinucleotide"
  misc_feature (61)..(61): /note="Nucleotide may be methylated to form 5-methylcytosine"
tgcgacgatggctgggacctggcggacgcggaggtcgtgtgccgccagctgggctgtggtcgggccgtcgccgccctgggggccgccgcctttggccctggctccgggcccgtgtggctgga

SEQ ID NO: 10840 - DNA, 122 bp, Homo sapiens
  misc_feature (61)..(62): /note="This region represents a CpG dinucleotide"
  misc_feature (61)..(61): /note="Nucleotide may be methylated to form 5-methylcytosine"
acttgctcttgtgggaaacagggattactaacaagttttccgattgaggactacctgacacggcagatttgtgatttagaaagattacaagtctgggcactgtggctcaagtctgtaatccc

SEQ ID NO: 10841 - DNA, 122 bp, Homo sapiens
  misc_feature (61)..(62): /note="This region represents a CpG dinucleotide"
  misc_feature (61)..(61): /note="Nucleotide may be methylated to form 5-methylcytosine"
ggtggtgccagactggggttcagatccctgccacatttacatgggctttgtgacacacgacgggtcatctaatgtctctgaactgcagcttctgcctatgtagaatgggagcagtaacacag

SEQ ID NO: 10842 - DNA, 122 bp, Homo sapiens
  misc_feature (61)..(62): /note="This region represents a CpG dinucleotide"
  misc_feature (61)..(61): /note="Nucleotide may be methylated to form 5-methylcytosine"
gtggcttctgcaagactgactcaggggtaggccctgaggtggaaatgggctagtcactagcgggtgccaatgaagacatgaagtgatttttatacagtcatctggctgctatatacagtcgt

SEQ ID NO: 10843 - DNA, 122 bp, Homo sapiens
  misc_feature (61)..(62): /note="This region represents a CpG dinucleotide"
  misc_feature (61)..(61): /note="Nucleotide may be methylated to form 5-methylcytosine"
gaatccaaaagtaaaaacattttcctttgacctaatctatttcttaatgttctctttcagcgtgttacccatataggcatcatttcggtagttatttagtgtacacattctataatgcattt

SEQ ID NO: 10844 - DNA, 122 bp, Homo sapiens
  misc_feature (61)..(62): /note="This region represents a CpG dinucleotide"
  misc_feature (61)..(61): /note="Nucleotide may be methylated to form 5-methylcytosine"
tcctcctcttcagcagcagctgcatcagctgcatcagcgtctacttcttcctcgcgcaggcgctgatgcagctcacccatatcctcgaagctagagcctgaggtatcatccatgttctccat

SEQ ID NO: 10845 - DNA, 122 bp, Homo sapiens
  misc_feature (61)..(62): /note="This region represents a CpG dinucleotide"
  misc_feature (61)..(61): /note="Nucleotide may be methylated to form 5-methylcytosine"
gaaggtaggaggtaggtgaggccattctgtatttggggacagtgaggtcaccttcccactcgtgtgtgtgggcggccgatgattgatttctgtcatacctgttaccatttggtgcagtatcg

SEQ ID NO: 10846 - DNA, 122 bp, Homo sapiens
  misc_feature (61)..(62): /note="This region represents a CpG dinucleotide"
  misc_feature (61)..(61): /note="Nucleotide may be methylated to form 5-methylcytosine"
gcacaccgttctgagtagtgtgatgaaatcttacaccatcctgctccatcctgcttgggacgtgaatcatctctttgtccagcatatccacactgtatgcactccctgcccatgaatcacat

SEQ ID NO: 10847 - DNA, 122 bp, Homo sapiens
  misc_feature (61)..(62): /note="This region represents a CpG dinucleotide"
  misc_feature (61)..(61): /note="Nucleotide may be methylated to form 5-methylcytosine"
tgttaaaaaacctaacccctcacaaaattagcaagagaaataagtatatcatgttagaaacggtgcatgatgacatacgcaaaagagacaatacaggactgtgagtaatagcacatgctttg

SEQ ID NO: 10848 - DNA, 122 bp, Homo sapiens
  misc_feature (61)..(62): /note="This region represents a CpG dinucleotide"
  misc_feature (61)..(61): /note="Nucleotide may be methylated to form 5-methylcytosine"
cacaataaagatctttgctctcatgaatcttactttctacttgaggagaaggactataaacgcaatgtttaaataacagtagatctgatgcaattaagacggatagagagtgacttattgtt

SEQ ID NO: 10849 - DNA, 122 bp, Homo sapiens
  misc_feature (61)..(62): /note="This region represents a CpG dinucleotide"
  misc_feature (61)..(61): /note="Nucleotide may be methylated to form 5-methylcytosine"
aaggcctcaagattttgttactgtttccactttcactttcctggaagtctaaggccattacgctaagaagaaacccaggatgaaatgtaacatgctgggagtggctcaactgttcctgccaa

SEQ ID NO: 10850 - DNA, 122 bp, Homo sapiens
  misc_feature (61)..(62): /note="This region represents a CpG dinucleotide"
  misc_feature (61)..(61): /note="Nucleotide may be methylated to form 5-methylcytosine"
caaggggcaatattattgcaggaacctttggaaaataaaacacagctattaacatgtttccgagaattgttcttttcatgggcattatacctttatagtgtacgtgtttgaacaatttacta

SEQ ID NO: 10851 - DNA, 122 bp, Homo sapiens
  misc_feature (61)..(62): /note="This region represents a CpG dinucleotide"
  misc_feature (61)..(61): /note="Nucleotide may be methylated to form 5-methylcytosine"
acctcccaaagtgctgagtttacaggtgtgagccatagggcctggccaagtttctaattacgtaagagaatttaagatctctgattggaacagactttaaaggcatctagttgaattattta

SEQ ID NO: 10852 - DNA, 122 bp, Homo sapiens
  misc_feature (61)..(62): /note="This region represents a CpG dinucleotide"
  misc_feature (61)..(61): /note="Nucleotide may be methylated to form 5-methylcytosine"
ataacaggctttagtcaggcagatctggcttgaaacctaaagtcattctgcagctgtttgcgtttggacaaatgccttgacctctctgagtatgtttgttctcatctgaaaaatggacataa

SEQ ID NO: 10853 - DNA, 122 bp, Homo sapiens
  misc_feature (61)..(62): /note="This region represents a CpG dinucleotide"
  misc_feature (61)..(61): /note="Nucleotide may be methylated to form 5-methylcytosine"
ctcacagatacctgtgggttctgtgctgttccagcccagcaggtcagggtgcagtcggctcgcccctgattggccagcagctccttcccttccagacttggcctccaggacctgcccttctt

SEQ ID NO: 10854 - DNA, 122 bp, Homo sapiens
  misc_feature (61)..(62): /note="This region represents a CpG dinucleotide"
  misc_feature (61)..(61): /note="Nucleotide may be methylated to form 5-methylcytosine"
gcatcaacacatgcctcatgggtgaggtgagccagtattcagggttgaacacgtgttcagcgagtcaaactgcacactgagtcagccatgaaacaagcgtctagataggggatgtggtaagg

SEQ ID NO: 10855 - DNA, 122 bp, Homo sapiens
  misc_feature (61)..(62): /note="This region represents a CpG dinucleotide"
  misc_feature (61)..(61): /note="Nucleotide may be methylated to form 5-methylcytosine"
ctcacaccatttgcctacctgcagagcttaaaacacttggtctgtaacatctctacctaccgattaaaaatgaaacactaaaagaaagtcaatttgcctcatgagaattttccacaatttca

SEQ ID NO: 10856 - DNA, 122 bp, Homo sapiens
  misc_feature (61)..(62): /note="This region represents a CpG dinucleotide"
  misc_feature (61)..(61): /note="Nucleotide may be methylated to form 5-methylcytosine"
cactggtgaaagagcaaataaatccttccccactatatttcctgcttcaggcccaggggccgtggtggacagtgttgccaggttagcataacttgaggtctgagcacgtagacacccactta

SEQ ID NO: 10857 - DNA, 122 bp, Homo sapiens
  misc_feature (61)..(62): /note="This region represents a CpG dinucleotide"
  misc_feature (61)..(61): /note="Nucleotide may be methylated to form 5-methylcytosine"
ctctggggggcagagcagcaggggaggaagctgacaagctgaactgcgtccaggccgggacggcgtgaaagacagacaggagcatctagttttgactcagtcaacaatggggaccaggtgca

SEQ ID NO: 10858 - DNA, 122 bp, Homo sapiens
  misc_feature (61)..(62): /note="This region represents a CpG dinucleotide"
  misc_feature (61)..(61): /note="Nucleotide may be methylated to form 5-methylcytosine"
gcggacacaggcacattcaagcttgaggcagagtggagcacaggaaagaacatatgggtgcgttcatcccagccttgtggattcctaatgccagctttgtcactcagtagtatgtgacttta

SEQ ID NO: 10859 - DNA, 122 bp, Homo sapiens
  misc_feature (61)..(62): /note="This region represents a CpG dinucleotide"
  misc_feature (61)..(61): /note="Nucleotide may be methylated to form 5-methylcytosine"
gtagagagagaataagtcacataattacctcatgcactttctgattttcaaacgatgacacgtaaaagagatgggtaataggaactggtatgatcagtggttgactatccctacaagatgtc

SEQ ID NO: 10860 - DNA, 122 bp, Homo sapiens
  misc_feature (61)..(62): /note="This region represents a CpG dinucleotide"
  misc_feature (61)..(61): /note="Nucleotide may be methylated to form 5-methylcytosine"
agctctttctaattcagaactgaggtcataattcaatctgtgattgacctcagagccaagcggattttgcttaagccatgccctgacttagtatcatggcacaaacccagatcaatagagaa

SEQ ID NO: 10861 - DNA, 122 bp, Homo sapiens
  misc_feature (61)..(62): /note="This region represents a CpG dinucleotide"
  misc_feature (61)..(61): /note="Nucleotide may be methylated to form 5-methylcytosine"
tttgttggtcaaatccgatctgccatatcctgtgtaatgacaagtgagttgcattctcaccgtcactcctggggtctctccgcttcccctgagctggctcagcagtctgctccatgtgtttt

SEQ ID NO: 10862 - DNA, 122 bp, Homo sapiens
  misc_feature (61)..(62): /note="This region represents a CpG dinucleotide"
  misc_feature (61)..(61): /note="Nucleotide may be methylated to form 5-methylcytosine"
ccatacagtacttagcatagaacatgccacagacttaacaaaacaactgatgctttactgcgtccttaccatgtgccaggaacccttttaagctctcatgcctattaactaatttatacttc

SEQ ID NO: 10863 - DNA, 122 bp, Homo sapiens
  misc_feature (61)..(62): /note="This region represents a CpG dinucleotide"
  misc_feature (61)..(61): /note="Nucleotide may be methylated to form 5-methylcytosine"
tgtcagttgttaggacaactctgtgcccggaactttaggctttactcagcaaggctaggtcgcaagtgcactgtcatttagggcagaaggactcatctcaggtaggaaactaaatgactcac

SEQ ID NO: 10864 - DNA, 122 bp, Homo sapiens
  misc_feature (61)..(62): /note="This region represents a CpG dinucleotide"
  misc_feature (61)..(61): /note="Nucleotide may be methylated to form 5-methylcytosine"
acaggggcccagagtgttgcaagaggtgttttgttccggtgtttaggagctgcttgggtgcggattttgagaagtgaatcttcaagtggtttttgaaaatagaaaagatctttgatctatgc

SEQ ID NO: 10865 - DNA, 122 bp, Homo sapiens
  misc_feature (61)..(62): /note="This region represents a CpG dinucleotide"
  misc_feature (61)..(61): /note="Nucleotide may be methylated to form 5-methylcytosine"
caaccgctatccacttgattaccatcacttagcagtgcgttttgtgtattctcatgcacacgtttgtatttgtcatgagtgatgagtttgcttctgcgttctcctcggttggtgtcatatca

SEQ ID NO: 10866 - DNA, 122 bp, Homo sapiens
  misc_feature (61)..(62): /note="This region represents a CpG dinucleotide"
  misc_feature (61)..(61): /note="Nucleotide may be methylated to form 5-methylcytosine"
ctgaagactctgctgttgttgattcaccaatttcttccctgcatttcaggtcaactaatccgtttccaagatagtacccctctgacatttatttgtctcttctactaaaatgagaacaggat

SEQ ID NO: 10867 - DNA, 122 bp, Homo sapiens
  misc_feature (61)..(62): /note="This region represents a CpG dinucleotide"
  misc_feature (61)..(61): /note="Nucleotide may be methylated to form 5-methylcytosine"
cacaagccaggtgaccagagacaaatgtcttacccactcagaaccacatggtcagaaccacgtgatcaggggaaccactgtccctgggttttagtgataatttattgaaacatgcccagtga

SEQ ID NO: 10868 - DNA, 122 bp, Homo sapiens
  misc_feature (61)..(62): /note="This region represents a CpG dinucleotide"
  misc_feature (61)..(61): /note="Nucleotide may be methylated to form 5-methylcytosine"
agacatcacagatagccaataaatgaagtcaggtatgatatgcatggtttaggctttcctcggtggttaaacaggccttttggaggcctagggttagcttgaatgtcagtccacattgcatg

SEQ ID NO: 10869 - DNA, 122 bp, Homo sapiens
  misc_feature (61)..(62): /note="This region represents a CpG dinucleotide"
  misc_feature (61)..(61): /note="Nucleotide may be methylated to form 5-methylcytosine"
ctttcctgctagctgagtttgtcttagcctttgcctagccacttgaatgtgtcatccatccgtttggcaggtgtttgaggctcatttgctcagctaaaaccagatacacttctgagtgctaa

SEQ ID NO: 10870 - DNA, 122 bp, Homo sapiens
  misc_feature (61)..(62): /note="This region represents a CpG dinucleotide"
  misc_feature (61)..(61): /note="Nucleotide may be methylated to form 5-methylcytosine"
ttcctgaatcacaactatccttcaaggccaatctcagataataccttctttggggatattcgttaatctcaaactgacctgtcttccctctgtctcaatttttcttatccctcttatacctt

SEQ ID NO: 10871 - DNA, 122 bp, Homo sapiens
  misc_feature (61)..(62): /note="This region represents a CpG dinucleotide"
  misc_feature (61)..(61): /note="Nucleotide may be methylated to form 5-methylcytosine"
tggtctgaaaatattaaatggaaaattccagaaaaatgaattggtaaattttaaattgcacgctgttctgggtagcccgactggtaggtgaatcatccctttgcccagtatatctgtctata

SEQ ID NO: 10872 - DNA, 122 bp, Homo sapiens
  misc_feature (61)..(62): /note="This region represents a CpG dinucleotide"
  misc_feature (61)..(61): /note="Nucleotide may be methylated to form 5-methylcytosine"
tgctccagaatttaattcaagaaattcaccagagagtcagaattatctggaaacacaatacgggatcctaactggctcattaatcaagttcctagaaaataactgattaatccatctgtcac

SEQ ID NO: 10873 - DNA, 122 bp, Homo sapiens
  misc_feature (61)..(62): /note="This region represents a CpG dinucleotide"
  misc_feature (61)..(61): /note="Nucleotide may be methylated to form 5-methylcytosine"
caacattacgctaagcatttagtagcccctacattgcaaacaaatcttttgaagattccccgtgaagagtgtaaatgaatcactttcaactattggccttatataactgactcatattctgc

SEQ ID NO: 10874 - DNA, 122 bp, Homo sapiens
  misc_feature (61)..(62): /note="This region represents a CpG dinucleotide"
  misc_feature (61)..(61): /note="Nucleotide may be methylated to form 5-methylcytosine"
ggaagctgcctcccatctcaactccctgagagccacaggtgcctggaggagctgtgctgccggaaaaagccgggggcctgcatcaccacctcagagctgttcaggaagctggtcctgtccag

SEQ ID NO: 10875 - DNA, 122 bp, Homo sapiens
  misc_feature (61)..(62): /note="This region represents a CpG dinucleotide"
  misc_feature (61)..(61): /note="Nucleotide may be methylated to form 5-methylcytosine"
tcaaaatgatataaaatccatttaccatcttcagtttagagcgtacagaggagattagggcgaacaaagaggaagatgtagttaagagaacaggctttggagccagaatcctaggtttaaat

SEQ ID NO: 10876 - DNA, 122 bp, Homo sapiens
  misc_feature (61)..(62): /note="This region represents a CpG dinucleotide"
  misc_feature (61)..(61): /note="Nucleotide may be methylated to form 5-methylcytosine"
aagttttaccacataacatgggtgacccatggctcattagcctctgtgctttggtttcctcgtgtacagaacaggaataacagtaaacccacttcacgggattgctgtgaggattaagtgag

SEQ ID NO: 10877 - DNA, 122 bp, Homo sapiens
  misc_feature (61)..(62): /note="This region represents a CpG dinucleotide"
  misc_feature (61)..(61): /note="Nucleotide may be methylated to form 5-methylcytosine"
atttgtaatgatttcccaggtgatgtcttctgcagaccacaatgcaagagtttctcaaatcggttgtttactgaaatttagggtgctcataaaattcagattccaaggcactaccctagccc

SEQ ID NO: 10878 - DNA, 122 bp, Homo sapiens
  misc_feature (61)..(62): /note="This region represents a CpG dinucleotide"
  misc_feature (61)..(61): /note="Nucleotide may be methylated to form 5-methylcytosine"
gagagccctggccaggactcacatagcaggaacaccagcatgtaggctaacattgcttctcgtttttaagtcaaagttctattccaaacacaagttttttttttctcaaatccacaatctaa

SEQ ID NO: 10879 - DNA, 122 bp, Homo sapiens
  misc_feature (61)..(62): /note="This region represents a CpG dinucleotide"
  misc_feature (61)..(61): /note="Nucleotide may be methylated to form 5-methylcytosine"
catccatttaaaataagaaaacatcagttacaagttttgtgccctcgggcagttatttaacgtctaaagaaatgcagtgttgtagttacaagcaggctcaagtgcttgtctcagcagcacgt

SEQ ID NO: 10880 - DNA, 122 bp, Homo sapiens
  misc_feature (61)..(62): /note="This region represents a CpG dinucleotide"
  misc_feature (61)..(61): /note="Nucleotide may be methylated to form 5-methylcytosine"
aacagaaaggtgacttagttccaaaggcaaatttgtttccatgacatttttctcttcccacgtgaccatgcctgccgggtttaggattcacagaattctgcgaaaatacagtcatgcatcac

SEQ ID NO: 10881 - DNA, 122 bp, Homo sapiens
  misc_feature (61)..(62): /note="This region represents a CpG dinucleotide"
  misc_feature (61)..(61): /note="Nucleotide may be methylated to form 5-methylcytosine"
gagtgagtcaggcgatggtgagcctccgtgccagaacaacttgtaggctgtggaagcaaccgcaaagggatggcagcggtgatatatatagttgaaagatcactgtctgctgtgtagaggat

SEQ ID NO: 10882 - DNA, 122 bp, Homo sapiens
  misc_feature (61)..(62): /note="This region represents a CpG dinucleotide"
  misc_feature (61)..(61): /note="Nucleotide may be methylated to form 5-methylcytosine"
gtcagttggaggtcagggaggcagggaaggggtaagctgtgggctgagagatgaaacaagcggttctaccaatccatgtgaaacctttagggagaatgtagggctttaaaaaacacatttgg

SEQ ID NO: 10883 - DNA, 122 bp, Homo sapiens
  misc_feature (61)..(62): /note="This region represents a CpG dinucleotide"
  misc_feature (61)..(61): /note="Nucleotide may be methylated to form 5-methylcytosine"
tctcttctgtctgggtgagtattgctatctacttccagcaagaaggaaactaaagcacagcgacaccaggtgatttgcctaaagtcacacagccatctgggtagtgacaggattagaaacca

SEQ ID NO: 10884 - DNA, 122 bp, Homo sapiens
  misc_feature (61)..(62): /note="This region represents a CpG dinucleotide"
  misc_feature (61)..(61): /note="Nucleotide may be methylated to form 5-methylcytosine"
ttacaactacctacctaagcaaaagatgttctgtgttcctttgttgctgatttagctgcccgaaatcaccatcttaagatgcccaaaatcacatcttaagaagtgttatgggcacatgaatt

SEQ ID NO: 10885 - DNA, 122 bp, Homo sapiens
  misc_feature (61)..(62): /note="This region represents a CpG dinucleotide"
  misc_feature (61)..(61): /note="Nucleotide may be methylated to form 5-methylcytosine"
ctgagcagtcctgggtcccagctctgtgtttcattgctttagaaggaacatcgacctttccgagcaatgaacatcagctccagctcataggcatgagtcagggcaggcttcaccaggccagg

SEQ ID NO: 10886 - DNA, 122 bp, Homo sapiens
  misc_feature (61)..(62): /note="This region represents a CpG dinucleotide"
  misc_feature (61)..(61): /note="Nucleotide may be methylated to form 5-methylcytosine"
taggctgtatggtgtagcctattgcccctaggctacaaacctgtacagcaggttactgtacggaatacttcaggcagttataaaatagtggtgtgtgtttgtgtatcaaaacagaaaaagta

SEQ ID NO: 10887 - DNA, 122 bp, Homo sapiens
  misc_feature (61)..(62): /note="This region represents a CpG dinucleotide"
  misc_feature (61)..(61): /note="Nucleotide may be methylated to form 5-methylcytosine"
aagtggtggagcttcttctggagcaagctcttctccaggaagcacagcaactcgtgcagacgagcgtccagctgccccgccttccagtcggcggcctgccggaggagtaggaggtgcagtag

SEQ ID NO: 10888 - DNA, 122 bp, Homo sapiens
  misc_feature (61)..(62): /note="This region represents a CpG dinucleotide"
  misc_feature (61)..(61): /note="Nucleotide may be methylated to form 5-methylcytosine"
atattcttgactttacctttctaccgtgctcactgtggccttgtgacttggtcggcatttcgtagtctgctgaaggtgggtgctgggttccgctttggtggggagacctgttgcctacagca

SEQ ID NO: 10889 - DNA, 122 bp, Homo sapiens
  misc_feature (61)..(62): /note="This region represents a CpG dinucleotide"
  misc_feature (61)..(61): /note="Nucleotide may be methylated to form 5-methylcytosine"
cacaaggtgacagtcaccactgtatgtttccagaaccagggactcaaacaccagggtttgcgtgattttatctttaccccgcaacagcaacagaagccggtggcgcctgtaaacgagtgaag

SEQ ID NO: 10890 - DNA, 122 bp, Homo sapiens
  misc_feature (61)..(62): /note="This region represents a CpG dinucleotide"
  misc_feature (61)..(61): /note="Nucleotide may be methylated to form 5-methylcytosine"
tccaagtgagtttctgagtcagcctgtgcgagggaggctcttggggctgggtgtgtgtgccgcctctgtgtgagcatgtgctagtcacacagctgggatatggccgtgttttggttccagct

SEQ ID NO: 10891 - DNA, 122 bp, Homo sapiens
  misc_feature (61)..(62): /note="This region represents a CpG dinucleotide"
  misc_feature (61)..(61): /note="Nucleotide may be methylated to form 5-methylcytosine"
ccccaccaaaattcacatactgaagtcctaacttctagtacctcagaatgtatctttattcgaagacaaggacttcaaaaaggtgattaagatgtggccattagggtgtggtagtccaatct

SEQ ID NO: 10892 - DNA, 122 bp, Homo sapiens
  misc_feature (61)..(62): /note="This region represents a CpG dinucleotide"
  misc_feature (61)..(61): /note="Nucleotide may be methylated to form 5-methylcytosine"
agttctgcagattgtcctccaggggctgcaagctgtgctttcaggaaacactcaagtgtccgctctggacaggatcagctcagggaggaggggcaggtgcccagctcctgcctgccagattt

SEQ ID NO: 10893 - DNA, 122 bp, Homo sapiens
  misc_feature (61)..(62): /note="This region represents a CpG dinucleotide"
  misc_feature (61)..(61): /note="Nucleotide may be methylated to form 5-methylcytosine"
ctttccttgtcacaaattaaagtcctctccagtggccaaggatttatcagcaaccttgttcgtaatgatcatcttatgaatggtgattaagaaaaataaatcacttcctcttgctaataaat

SEQ ID NO: 10894 - DNA, 122 bp, Homo sapiens
  misc_feature (61)..(62): /note="This region represents a CpG dinucleotide"
  misc_feature (61)..(61): /note="Nucleotide may be methylated to form 5-methylcytosine"
acggtgggttgcatggtaagtgtatgcatccacacatctactcctggcaatgggtagaagcgcaattagctggggaagttcagagcccaggcctgtaactaaagctggagacaagcccaaat

SEQ ID NO: 10895 - DNA, 122 bp, Homo sapiens
  misc_feature (61)..(62): /note="This region represents a CpG dinucleotide"
  misc_feature (61)..(61): /note="Nucleotide may be methylated to form 5-methylcytosine"
acaccaaggattgttgggagctgtcacatgcagttagctgagaaatacaactcatcctgacgagtcaggtaatgacatgaagcacaggcagccactcactctgaccagacacctgaagccat

SEQ ID NO: 10896 - DNA, 122 bp, Homo sapiens
  misc_feature (61)..(62): /note="This region represents a CpG dinucleotide"
  misc_feature (61)..(61): /note="Nucleotide may be methylated to form 5-methylcytosine"
ttccaagttcagggatacatcatcataacccctatcagcgaggctgaaaacctgaatcatcgagcattcctccctcctgaaacttttgtcatcaagtctgcttagtacttctttccgcatgt

SEQ ID NO: 10897 - DNA, 122 bp, Homo sapiens
  misc_feature (61)..(62): /note="This region represents a CpG dinucleotide"
  misc_feature (61)..(61): /note="Nucleotide may be methylated to form 5-methylcytosine"
gtaactgccaatgagtaagaaagagccaacctcagcttctttaatctctccccaaatgggcggaagaaccgtaggctctcactgaggttcctgcagtatctataaaaagaaccggaaggaca

SEQ ID NO: 10898 - DNA, 122 bp, Homo sapiens
  misc_feature (61)..(62): /note="This region represents a CpG dinucleotide"
  misc_feature (61)..(61): /note="Nucleotide may be methylated to form 5-methylcytosine"
cttgatgaacttcctcttcttctcatgtctccggtaggccacgtgcatggccactaggagcgctggcgtggacacgaagatcagctgcagggcccatagccggatgtgggagatggggaagt

SEQ ID NO: 10899 - DNA, 122 bp, Homo sapiens
  misc_feature (61)..(62): /note="This region represents a CpG dinucleotide"
  misc_feature (61)..(61): /note="Nucleotide may be methylated to form 5-methylcytosine"
actgagattggttgacattgcaagctcagttttcattcaagcagacacagcatccgacaccgcctatggaccagagtttgattacataatactcgcaggttaccaaattatttacacaactt

SEQ ID NO: 10900 - DNA, 122 bp, Homo sapiens
  misc_feature (61)..(62): /note="This region represents a CpG dinucleotide"
  misc_feature (61)..(61): /note="Nucleotide may be methylated to form 5-methylcytosine"
agatcaacactttgataatccatcactcaaattgtctcatactatagtatcctaagcctccgtatctttggctgtaaacaagtagacttagcttgtttagatcagatgctatttctctccct

SEQ ID NO: 10901 - DNA, 122 bp, Homo sapiens
  misc_feature (61)..(62): /note="This region represents a CpG dinucleotide"
  misc_feature (61)..(61): /note="Nucleotide may be methylated to form 5-methylcytosine"
atagcatgtgtcatacatatattctctctcactcatacacacatactcgctcttcttgtccggcttttaaaaaggaaggcagccagaaggccaagcccagtgatttgagttgaaaaggctgt

SEQ ID NO: 10902 - DNA, 122 bp, Homo sapiens
  misc_feature (61)..(62): /note="This region represents a CpG dinucleotide"
  misc_feature (61)..(61): /note="Nucleotide may be methylated to form 5-methylcytosine"
agactcccagagacccaaacgcctccctctctattttctcaagaagagggaactgaggcccggagggacattgcgtctcaccccaggtcacagggcaaggcagttgcagaaccggactgcga

SEQ ID NO: 10903 - DNA, 122 bp, Homo sapiens
  misc_feature (61)..(62): /note="This region represents a CpG dinucleotide"
  misc_feature (61)..(61): /note="Nucleotide may be methylated to form 5-methylcytosine"
aacacatatattttggccctaaaaatagacagtgaaaaagagatgggattgcttctctttcgattgttggcagacctattgggtaacatttaatcattttgggctggacacggtggctcctg

SEQ ID NO: 10904 - DNA, 122 bp, Homo sapiens
  misc_feature (61)..(62): /note="This region represents a CpG dinucleotide"
  misc_feature (61)..(61): /note="Nucleotide may be methylated to form 5-methylcytosine"
gctaaatttaatgactcttattttatcagtaagaaaccaaggctaagcccttaaattggccggagctaaattgacatgccagcttcagagctgattccaaagcctggcatttttcgttacaa

SEQ ID NO: 10905 - DNA, 122 bp, Homo sapiens
  misc_feature (61)..(62): /note="This region represents a CpG dinucleotide"
  misc_feature (61)..(61): /note="Nucleotide may be methylated to form 5-methylcytosine"
aacagccttgacaagtgtgaagtagctgactcaggaaagcaaccagatgggaagctgtgacgtaatgtgatgaactccaggttcaagagtcacacatgttgtaagagtgcatcccgggccgg

SEQ ID NO: 10906 - DNA, 122 bp, Homo sapiens
  misc_feature (61)..(62): /note="This region represents a CpG dinucleotide"
  misc_feature (61)..(61): /note="Nucleotide may be methylated to form 5-methylcytosine"
aaatgagttcagcaggactgcaaggagctacagcattccaaccctgtgtgtgacaggggccgaagccagagggtgccaggcccaggaggggaaccctgcaatgctcacctcggctgcagctg

SEQ ID NO: 10907 - DNA, 122 bp, Homo sapiens
  misc_feature (61)..(62): /note="This region represents a CpG dinucleotide"
  misc_feature (61)..(61): /note="Nucleotide may be methylated to form 5-methylcytosine"
tctgtattactcatcttgatctggcatttacccttttacaacaatgtcttatgtctgacccgctttaaggattaccttctccgtaaaacctgccctgaactcttgatcttccccaacaacca

SEQ ID NO: 10908 - DNA, 122 bp, Homo sapiens
  misc_feature (61)..(62): /note="This region represents a CpG dinucleotide"
  misc_feature (61)..(61): /note="Nucleotide may be methylated to form 5-methylcytosine"
aaatccctcagcagatgtgtcttcatgaatcattggtcacactgagtcacatgcctcttccgtgaggtaacatcaaggaaatggaatgtccacaactggcttaatcagagtagctgggaagg

SEQ ID NO: 10909 - DNA, 122 bp, Homo sapiens
  misc_feature (61)..(62): /note="This region represents a CpG dinucleotide"
  misc_feature (61)..(61): /note="Nucleotide may be methylated to form 5-methylcytosine"
gattacaggcgtgagccactgcgcctggcctctaatcactgttagctaccaagtgcttatcgtgtgcctggctcggtgcagactctttgtggcacctcatttaatccgcccagcaactttac

SEQ ID NO: 10910 - DNA, 122 bp, Homo sapiens
  misc_feature (61)..(62): /note="This region represents a CpG dinucleotide"
  misc_feature (61)..(61): /note="Nucleotide may be methylated to form 5-methylcytosine"
gaaacaaactgtcgtgctatggaacatgccctgtggcagaaaacagtgaacagcctctggcggctgagggcctcaggtctacagttgcaagaaacctaatcttgtaaatatccagtgagctt

SEQ ID NO: 10911 - DNA, 122 bp, Homo sapiens
  misc_feature (61)..(62): /note="This region represents a CpG dinucleotide"
  misc_feature (61)..(61): /note="Nucleotide may be methylated to form 5-methylcytosine"
tccagcggaaagcctcctgtggctctgacgggcgagaatatccccggtgatttggacacacgcacctcttcctggcggggtatttgattaaggaagaaactccctgtgttatgtaagatctg

SEQ ID NO: 10912 - DNA, 122 bp, Homo sapiens
  misc_feature (61)..(62): /note="This region represents a CpG dinucleotide"
  misc_feature (61)..(61): /note="Nucleotide may be methylated to form 5-methylcytosine"
cccaagcctcggctgcaggaggaaactctcccagggcctggcagagcagcagctgcctcacgagggagcctgcaaagggaaaaacaaggcctccaccctcgaagcacttccagcttcccagg

SEQ ID NO: 10913 - DNA, 122 bp, Homo sapiens
  misc_feature (61)..(62): /note="This region represents a CpG dinucleotide"
  misc_feature (61)..(61): /note="Nucleotide may be methylated to form 5-methylcytosine"
gactgagggttatgtgcgcaggctttgaaacaagacagtcatgagctcaatccctggtaacgggtttagctggtgtgttatcttaaacctgttacttaatccgcctgagccttggtttcctc

SEQ ID NO: 10914 - DNA, 122 bp, Homo sapiens
  misc_feature (61)..(62): /note="This region represents a CpG dinucleotide"
  misc_feature (61)..(61): /note="Nucleotide may be methylated to form 5-methylcytosine"
ttttggttctgtttacattcttgtcagaaagcccgctattttaagtcagcgcctctcaaacgtgaatgcgcataaggatcacccagggatcttgccacagcctaagtcctgatttgggagtt

SEQ ID NO: 10915 - DNA, 122 bp, Homo sapiens
  misc_feature (61)..(62): /note="This region represents a CpG dinucleotide"
  misc_feature (61)..(61): /note="Nucleotide may be methylated to form 5-methylcytosine"
tattatgtgaacacttaatgctggagttgtcaccatactaatttttaagtcctacttacacgtaggcagaaatgatgacatgcttagcatttttcatcactttgaccaagaggcagaatctg

SEQ ID NO: 10916 - DNA, 122 bp, Homo sapiens
  misc_feature (61)..(62): /note="This region represents a CpG dinucleotide"
  misc_feature (61)..(61): /note="Nucleotide may be methylated to form 5-methylcytosine"
ttatgcttcacaggtttgttgtggcctgttcagcctggaaatcctgtcccgagactgatgcggaaaagctagttcagctgactttttgtgcttttcatgatatgatacagctgatgaactct

SEQ ID NO: 10917 - DNA, 122 bp, Homo sapiens
  misc_feature (61)..(62): /note="This region represents a CpG dinucleotide"
  misc_feature (61)..(61): /note="Nucleotide may be methylated to form 5-methylcytosine"
actctgttaaccccttttctcatctcaacacagtgtaatttagccttctgataatttactcgttcacccacatcatctgagcacccactgtgcaacaggcagcgggccagacactagggaca

SEQ ID NO: 10918 - DNA, 122 bp, Homo sapiens
  misc_feature (61)..(62): /note="This region represents a CpG dinucleotide"
  misc_feature (61)..(61): /note="Nucleotide may be methylated to form 5-methylcytosine"
cagaagtctttatagaggccaaagtcatctccaataatcctgaatgagtcaaagttcatccgctagccactttctcattgggaaagtctgccctggagaaggttaactctcctgtacatttg

SEQ ID NO: 10919 - DNA, 122 bp, Homo sapiens
  misc_feature (61)..(62): /note="This region represents a CpG dinucleotide"
  misc_feature (61)..(61): /note="Nucleotide may be methylated to form 5-methylcytosine"
ctcttgggcacaaatcatgccaataatttaatcatcactataacttaattcctagcctgtcgtagatgcgcaatacatcctctggatggaggaagggaggtactacttctaggcaagctgcc

SEQ ID NO: 10920 - DNA, 122 bp, Homo sapiens
  misc_feature (61)..(62): /note="This region represents a CpG dinucleotide"
  misc_feature (61)..(61): /note="Nucleotide may be methylated to form 5-methylcytosine"
tctcttccagctgacagccaaaagttgagttggttggctaacacctggatatggcccaggcgtgcaggaagcatatctacctctggctggtgctaaaggccctaaggccgggaagcagggag

SEQ ID NO: 10921 - DNA, 122 bp, Homo sapiens
  misc_feature (61)..(62): /note="This region represents a CpG dinucleotide"
  misc_feature (61)..(61): /note="Nucleotide may be methylated to form 5-methylcytosine"
cacacttgcccgtccaacttgctcagcttttgctgctctgagggggccacagtatgccaacggctgccctcgaactgctgcagcttgcctggggagaggaaccagcacactgggtgcagacg

SEQ ID NO: 10922 - DNA, 122 bp, Homo sapiens
  misc_feature (61)..(62): /note="This region represents a CpG dinucleotide"
  misc_feature (61)..(61): /note="Nucleotide may be methylated to form 5-methylcytosine"
tctaatatgcattccagtggttaaagaacaggaaataatcctgaaatcaaagcttggagacgggttatttgcccttgagttccaggactcctgtgtgtttggaattgttttacataaatcca

SEQ ID NO: 10923 - DNA, 122 bp, Homo sapiens
  misc_feature (61)..(62): /note="This region represents a CpG dinucleotide"
  misc_feature (61)..(61): /note="Nucleotide may be methylated to form 5-methylcytosine"
cctccttcatttgcctggggctcttctcacatgtccctgctgacagggtaagcagtggttcgtgtaaaccattccattcacatcctctgcttacttgcattactggttctcctactctcatg

SEQ ID NO: 10924 - DNA, 122 bp, Homo sapiens
  misc_feature (61)..(62): /note="This region represents a CpG dinucleotide"
  misc_feature (61)..(61): /note="Nucleotide may be methylated to form 5-methylcytosine"
tctggatgaggccttggcttcctctccaagtgcattaaggccggagagtgacatctgattcgcatgttaaaatgctagctgtgatagtacagaacagtctatgggggcatggggatggggga

SEQ ID NO: 10925 - DNA, 122 bp, Homo sapiens
  misc_feature (61)..(62): /note="This region represents a CpG dinucleotide"
  misc_feature (61)..(61): /note="Nucleotide may be methylated to form 5-methylcytosine"
acctcgtgacccgcccgcctcggcctcccaaagtgctgggattacaggcgtgagccatcgcgccgagccaggaaaatgtaaggttttaagaactttgtacaagaaccaaatagaacaaaaga

SEQ ID NO: 10926 - DNA, 122 bp, Homo sapiens
  misc_feature (61)..(62): /note="This region represents a CpG dinucleotide"
  misc_feature (61)..(61): /note="Nucleotide may be methylated to form 5-methylcytosine"
atcctacaaggcaagccactacacatattgttcttggttgttaacttacaacattcactgcgtactgttcacaggtagcctcagcctatacttcaccatggagacttcccacaggctctgga

SEQ ID NO: 10927 - DNA, 122 bp, Homo sapiens
  misc_feature (61)..(62): /note="This region represents a CpG dinucleotide"
  misc_feature (61)..(61): /note="Nucleotide may be methylated to form 5-methylcytosine"
tgtggccacactgcctggggctctggggacttgactaagttgtgtggactctcggagcctcgtttctcatctgtcaagagggagaagttagtaatcatagctcctgcagagtagttatgagg

SEQ ID NO: 10928 - DNA, 122 bp, Homo sapiens
  misc_feature (61)..(62): /note="This region represents a CpG dinucleotide"
  misc_feature (61)..(61): /note="Nucleotide may be methylated to form 5-methylcytosine"
agtacacctaagaacttcaagctggcagttggaagaacattaggttgaagatgctggaaacgagctgcaaatcgagttgtgttgccccgttttctgctagattgctgacttgcagtttcctt

SEQ ID NO: 10929 - DNA, 122 bp, Homo sapiens
  misc_feature (61)..(62): /note="This region represents a CpG dinucleotide"
  misc_feature (61)..(61): /note="Nucleotide may be methylated to form 5-methylcytosine"
tatgtaggcttagagcacaggagaaaggtcttaaaaccctgggcttatgggacgttaccacggagactgcacagagtgagaagatccattttaaagctgatgatgaataatattttcgttat

SEQ ID NO: 10930 - DNA, 122 bp, Homo sapiens
  misc_feature (61)..(62): /note="This region represents a CpG dinucleotide"
  misc_feature (61)..(61): /note="Nucleotide may be methylated to form 5-methylcytosine"
gccatggcccagggcgtggccatagatacttctagactgacactcactaggctctcaggccgacaccactcacatgacttctactgagggaatgcagtctggcgagagagcagcaggagaca

SEQ ID NO: 10931 - DNA, 122 bp, Homo sapiens
  misc_feature (61)..(62): /note="This region represents a CpG dinucleotide"
  misc_feature (61)..(61): /note="Nucleotide may be methylated to form 5-methylcytosine"
gctatgactagcctgctagtcagccctccagctgaccacagacacaagagcaagccaagccgagattagctgagtccagcccaggtttacagaaccacctagctgacctatagatttgtgag

SEQ ID NO: 10932 - DNA, 122 bp, Homo sapiens
  misc_feature (61)..(62): /note="This region represents a CpG dinucleotide"
  misc_feature (61)..(61): /note="Nucleotide may be methylated to form 5-methylcytosine"
gctgctgcagaggaacacacaagactctttgcattcattcaatcaacacttgcaggacggcgctctcccagggctagtcggtcctgggcgccaggaacttcaaggacaattgagcttcagcc

SEQ ID NO: 10933 - DNA, 122 bp, Homo sapiens
  misc_feature (61)..(62): /note="This region represents a CpG dinucleotide"
  misc_feature (61)..(61): /note="Nucleotide may be methylated to form 5-methylcytosine"
aggagtggttacagtaggtagggtcttttgaatatcatctcatggcctcattctcaccagcgcaggttttcctgactatcctcatattagcacagagcaccttacctccatcatagcctcat

SEQ ID NO: 10934 - DNA, 122 bp, Homo sapiens
  misc_feature (61)..(62): /note="This region represents a CpG dinucleotide"
  misc_feature (61)..(61): /note="Nucleotide may be methylated to form 5-methylcytosine"
ccatctgactcaaacttgctcaattctagcctttgcatgccaagtaactatgcatctctacgtcctcattcaatatgactctgattgcagttaggtgcatggggactgaagtaatatagagt

SEQ ID NO: 10935 - DNA, 122 bp, Homo sapiens
  misc_feature (61)..(62): /note="This region represents a CpG dinucleotide"
  misc_feature (61)..(61): /note="Nucleotide may be methylated to form 5-methylcytosine"
ccaagcaacgtaattcctgttttcatgggtcctgtagatgtttgagtcaggaaggtaaggcggggagtgactgaataaactctgccttttaaattgagcatctgggccgggcatggtggctc

SEQ ID NO: 10936 - DNA, 122 bp, Homo sapiens
  misc_feature (61)..(62): /note="This region represents a CpG dinucleotide"
  misc_feature (61)..(61): /note="Nucleotide may be methylated to form 5-methylcytosine"
ccctggtgtcacaaagcaggttgggcagggctgaaatccaaacccaggcctcatttcaggcgctgctgtttccatcatcccaagaacaagaccagctggccttctgcagtccctgccaggtc

SEQ ID NO: 10937 - DNA, 122 bp, Homo sapiens
  misc_feature (61)..(62): /note="This region represents a CpG dinucleotide"
  misc_feature (61)..(61): /note="Nucleotide may be methylated to form 5-methylcytosine"
cccattccccactgcccttttacagatgaggaaacagactcacaaagaccttgtaagtcacgagtcagaactgagtagtagcatcattacgggctggaagatgttaaaccttcccagttcct

SEQ ID NO: 10938 - DNA, 122 bp, Homo sapiens
  misc_feature (61)..(62): /note="This region represents a CpG dinucleotide"
  misc_feature (61)..(61): /note="Nucleotide may be methylated to form 5-methylcytosine"
tagtgtaagaaaacacatcagacggtccaggcactcagacatagtgttggagcttgggcccgttgcttgtgctgcagaggaaggccattggtttgagtaaacttgtggtcaggtaacacttc

SEQ ID NO: 10939 - DNA, 122 bp, Homo sapiens
  misc_feature (61)..(62): /note="This region represents a CpG dinucleotide"
  misc_feature (61)..(61): /note="Nucleotide may be methylated to form 5-methylcytosine"
tcaagggctgtgttaggcactggtgatacaacgtcaacatgggagacatgctcctgtcctcgaagaactgacaatccaatgtagatacaaagacccaggcaattatgatacagggcagcttg

SEQ ID NO: 10940 - DNA, 122 bp, Homo sapiens
  misc_feature (61)..(62): /note="This region represents a CpG dinucleotide"
  misc_feature (61)..(61): /note="Nucleotide may be methylated to form 5-methylcytosine"
acatttcctagcttaccttgatgacaaatcagaatgtttacctattatgtttgcctagagcgaggaaacaatggaaactttttagagcgtgtgtgtgcatctgtgcccatgtgcctgtgtgt

SEQ ID NO: 10941 - DNA, 122 bp, Homo sapiens
  misc_feature (61)..(62): /note="This region represents a CpG dinucleotide"
  misc_feature (61)..(61): /note="Nucleotide may be methylated to form 5-methylcytosine"
ctcctttcttctctttcacaccctcacctttggctaggccactcgatgttgcaagaaacacgtccatcagcaattgcctcagtagaaaactccctctgctcccctcctgcatccacatagca

SEQ ID NO: 10942 - DNA, 122 bp, Homo sapiens
  misc_feature (61)..(62): /note="This region represents a CpG dinucleotide"
  misc_feature (61)..(61): /note="Nucleotide may be methylated to form 5-methylcytosine"
actcctcaccgtcctgatgcttggctggttctcctagatcactatttctgttccagaggacgggaaacactatgaggcctccatctggccataaggagccctggcatgagcctctccccatc

SEQ ID NO: 10943 - DNA, 122 bp, Homo sapiens
  misc_feature (61)..(62): /note="This region represents a CpG dinucleotide"
  misc_feature (61)..(61): /note="Nucleotide may be methylated to form 5-methylcytosine"
aggctcctcttgaaagctcttgtgctcagctagctagtcattgtgactcagctctgcctgcgaagcgcctacagtctagttgagaaggtaaggtacataagtataactatattaaaaagcag

SEQ ID NO: 10944 - DNA, 122 bp, Homo sapiens
  misc_feature (61)..(62): /note="This region represents a CpG dinucleotide"
  misc_feature (61)..(61): /note="Nucleotide may be methylated to form 5-methylcytosine"
aatataaaggcaaagctgctgaagtcctatctcactcatctctccccacccagaagtcaacgacagacttgggaaatgtaatttagcttgaagctagcttatagagacctgaagtagtctga

SEQ ID NO: 10945 - DNA, 122 bp, Homo sapiens
  misc_feature (61)..(62): /note="This region represents a CpG dinucleotide"
  misc_feature (61)..(61): /note="Nucleotide may be methylated to form 5-methylcytosine"
cccaaaacaaaagacaaaacaaaacaaaacaaaacaaaaaaagacatgggcagagggagacgggcaaagacacacacacaggagaaagcaatgtgaagacagaggcagagactggaatgatg

SEQ ID NO: 10946 - DNA, 122 bp, Homo sapiens
  misc_feature (61)..(62): /note="This region represents a CpG dinucleotide"
  misc_feature (61)..(61): /note="Nucleotide may be methylated to form 5-methylcytosine"
gccacagacgactgtcttactctagccagatggctcacaaatgtgtagcctcaaatagcgcgtaagagaggaagagggtgtgggaagggctcagaggtgccagaagcaacaacccgagggca

SEQ ID NO: 10947 - DNA, 122 bp, Homo sapiens
  misc_feature (61)..(62): /note="This region represents a CpG dinucleotide"
  misc_feature (61)..(61): /note="Nucleotide may be methylated to form 5-methylcytosine"
atttcttcagaagtacagctttgcctaccattcacattaggtgatcagaaccaccatgtacgtgttttctgccatcccagaagtgagaatagtgaatagagaggaagacagagttgatcaga

SEQ ID NO: 10948 - DNA, 122 bp, Homo sapiens
  misc_feature (61)..(62): /note="This region represents a CpG dinucleotide"
  misc_feature (61)..(61): /note="Nucleotide may be methylated to form 5-methylcytosine"
gtttggaaagggaaacaacacattgaatgccaacccctggactagatatttcatcaacttcgttcatcctcactaccacccacacaagacggtcttcctatttccaacttagaagaaggaag

SEQ ID NO: 10949 - DNA, 122 bp, Homo sapiens
  misc_feature (61)..(62): /note="This region represents a CpG dinucleotide"
  misc_feature (61)..(61): /note="Nucleotide may be methylated to form 5-methylcytosine"
gagtaggagttagccaagcgaagagagtggagacatgttctggacaaagggaacagaatacgtctggaagcctgagagagcttatgttagagaaacatactaaggtacagctggggtaaggc

SEQ ID NO: 10950 - DNA, 122 bp, Homo sapiens
  misc_feature (61)..(62): /note="This region represents a CpG dinucleotide"
  misc_feature (61)..(61): /note="Nucleotide may be methylated to form 5-methylcytosine"
gtttcatggtaacttttgtgactggctttagctgtgtaatgtcctcccagcctgttgagtcgcagggcagctttttaccttcttagcatgagccaacttcgactttctcgccaacttcgact

SEQ ID NO: 10951 - DNA, 122 bp, Homo sapiens
  misc_feature (61)..(62): /note="This region represents a CpG dinucleotide"
  misc_feature (61)..(61): /note="Nucleotide may be methylated to form 5-methylcytosine"
tttggttttctagttattgaggtcaacttcccccaagtcaaacattaagggaattataagcgctcttttgtgaatttgtttgctttagtgtggcacatatttggttagccctcttacttaaa

SEQ ID NO: 10952 - DNA, 122 bp, Homo sapiens
  misc_feature (61)..(62): /note="This region represents a CpG dinucleotide"
  misc_feature (61)..(61): /note="Nucleotide may be methylated to form 5-methylcytosine"
actatactaattatatagttgcatgacgactgatttccctaatgatggctaggagttacacgatcattaaatatagcctccatgtttatatgtgttttgaagtacagtattacccccttatc

SEQ ID NO: 10953 - DNA, 122 bp, Homo sapiens
  misc_feature (61)..(62): /note="This region represents a CpG dinucleotide"
  misc_feature (61)..(61): /note="Nucleotide may be methylated to form 5-methylcytosine"
aaacaacgtttaaggagggttggccatgggccatgaagtatgccaagtgctatgccaaggcgtatccttctcttgccaagtcctttttaacgaccctgagtggttactcatacagctcaggg

SEQ ID NO: 10954 - DNA, 122 bp, Homo sapiens
  misc_feature (61)..(62): /note="This region represents a CpG dinucleotide"
  misc_feature (61)..(61): /note="Nucleotide may be methylated to form 5-methylcytosine"
atttcatggttgggtggggctaggttgctcttacacatcctagatggacagcctgccacacgcctgggccgtgtggtacatagcccagggctcctgagctgtggacctgtgcagcaggtgac

SEQ ID NO: 10955 - DNA, 122 bp, Homo sapiens
  misc_feature (61)..(62): /note="This region represents a CpG dinucleotide"
  misc_feature (61)..(61): /note="Nucleotide may be methylated to form 5-methylcytosine"
tccctcagcagcatgtctctgcagtgcagaagtagattaagatcagtcgtggcaggtgctcgttatagctcgttatagcaagcactacagattattttgcacagagcttgctgttgagtgaa

SEQ ID NO: 10956 - DNA, 122 bp, Homo sapiens
  misc_feature (61)..(62): /note="This region represents a CpG dinucleotide"
  misc_feature (61)..(61): /note="Nucleotide may be methylated to form 5-methylcytosine"
gcagcatagataatggttaaggaatgtggccattgcattcgattacctggattcaaattacgatacctacactaaaaagctgtgagactgtgaatcatggatttgacctctatctgcctcat

SEQ ID NO: 10957 - DNA, 122 bp, Homo sapiens
  misc_feature (61)..(62): /note="This region represents a CpG dinucleotide"
  misc_feature (61)..(61): /note="Nucleotide may be methylated to form 5-methylcytosine"
ttcacacatacttgttgagcatcctaccatgggccagggttaggcaagggactgatcatacggacaggaaggagtcccagatcatgcccttggggagttcatagtttagtgggaggagagat

SEQ ID NO: 10958 - DNA, 122 bp, Homo sapiens
  misc_feature (61)..(62): /note="This region represents a CpG dinucleotide"
  misc_feature (61)..(61): /note="Nucleotide may be methylated to form 5-methylcytosine"
gtctttttgccccttctcccaatgacaaggcaagtctcagcgggtgaccttggtgtgtgccgcagggttcaggctcttggagcccagctgccctgctgagagagcgggaggatagtcgcacc

SEQ ID NO: 10959 - DNA, 122 bp, Homo sapiens
  misc_feature (61)..(62): /note="This region represents a CpG dinucleotide"
  misc_feature (61)..(61): /note="Nucleotide may be methylated to form 5-methylcytosine"
tctttcggagttcaatcttcaggaacagtcctaggctgaagatgatgatgccagccaacacggagaaccagttcatgagccagagcccttgggccaacttgacccgcttcttctggtcaaac

SEQ ID NO: 10960 - DNA, 122 bp, Homo sapiens
  misc_feature (61)..(62): /note="This region represents a CpG dinucleotide"
  misc_feature (61)..(61): /note="Nucleotide may be methylated to form 5-methylcytosine"
tgactcctcaaatctcatactgtcattgccagaacagtccagaatatctggaggcctacacgtgaaatgacagtcatccgtctttgagtatatcgggcacaccctcccctacatccccgccc

SEQ ID NO: 10961 - DNA, 122 bp, Homo sapiens
  misc_feature (61)..(62): /note="This region represents a CpG dinucleotide"
  misc_feature (61)..(61): /note="Nucleotide may be methylated to form 5-methylcytosine"
gtctcttcgctgtcacagagtaactaaaggccagagcctcagatttgcttattcactcatcgcaacaatggggaattgaagacttgttggaatgataaaattcttgccaatatccaagaaga

SEQ ID NO: 10962 - DNA, 122 bp, Homo sapiens
  misc_feature (61)..(62): /note="This region represents a CpG dinucleotide"
  misc_feature (61)..(61): /note="Nucleotide may be methylated to form 5-methylcytosine"
gcaagaagcaaacaagacgcaaaaactgtgcaaataagaccaagccagtaactttagttacgacactgcagattacactggaataacaggtttgtgaggctatagtgtgcaccacattaaaa

SEQ ID NO: 10963 - DNA, 122 bp, Homo sapiens
  misc_feature (61)..(62): /note="This region represents a CpG dinucleotide"
  misc_feature (61)..(61): /note="Nucleotide may be methylated to form 5-methylcytosine"
cttcctgactcagggcactgaaatcaccacgttgcttttgggttgcccaaaacactgtgtcgccaagaaaagcctttcaaagcccctttcgggaagggatttttttcgaacttgaaacaaga

SEQ ID NO: 10964 - DNA, 122 bp, Homo sapiens
  misc_feature (61)..(62): /note="This region represents a CpG dinucleotide"
  misc_feature (61)..(61): /note="Nucleotide may be methylated to form 5-methylcytosine"
actgacattgccaaagaagaatcctggacagagttcctttcaggtgaaagagcacagacacgggagtaggcaacagttagagtaaggtcaacattcctcagtgaactaagacacattcattc

SEQ ID NO: 10965 - DNA, 122 bp, Homo sapiens
  misc_feature (61)..(62): /note="This region represents a CpG dinucleotide"
  misc_feature (61)..(61): /note="Nucleotide may be methylated to form 5-methylcytosine"
acctcaagtctccaggcagccccatgaggtaagcaagtttccttcatgtccctgttttgccgatgaggaagtagtaagagtaaatagactagggaaccacaacctgatcacctctcttctgg

SEQ ID NO: 10966 - DNA, 122 bp, Homo sapiens
  misc_feature (61)..(62): /note="This region represents a CpG dinucleotide"
  misc_feature (61)..(61): /note="Nucleotide may be methylated to form 5-methylcytosine"
catgtcaggaggcaaaggggaagcaagatgccttcctcacaaggcggccggaagaagtgccgagaaaggggaaagagcctcttacataaccatcagctgtggtgagaattcactcactatca

SEQ ID NO: 10967 - DNA, 122 bp, Homo sapiens
  misc_feature (61)..(62): /note="This region represents a CpG dinucleotide"
  misc_feature (61)..(61): /note="Nucleotide may be methylated to form 5-methylcytosine"
catttaaactccttcaatggtttataaaaacctcaataaaatagcccagccttactctctcgtctaatctcttgagactagccactccccacatccacaccccacggtgagctctacattca

SEQ ID NO: 10968 - DNA, 122 bp, Homo sapiens
  misc_feature (61)..(62): /note="This region represents a CpG dinucleotide"
  misc_feature (61)..(61): /note="Nucleotide may be methylated to form 5-methylcytosine"
ctctgagctgcttttctgggcacactgcctgtagggtagtcctggtcttaaggagcagtacgtctgctgctgtacactgctgcttcaatacaaattgctgtttaacccacctgtttaacacc

SEQ ID NO: 10969 - DNA, 122 bp, Homo sapiens
  misc_feature (61)..(62): /note="This region represents a CpG dinucleotide"
  misc_feature (61)..(61): /note="Nucleotide may be methylated to form 5-methylcytosine"
ccacgttgtgcacttgtaattgcctagacttccattgcttaaggaggcagctgctagccacgtgaggctaaagttaattaaaactaggctgggtgtggtggctcatgcctgtaatcccagca

SEQ ID NO: 10970 - DNA, 122 bp, Homo sapiens
  misc_feature (61)..(62): /note="This region represents a CpG dinucleotide"
  misc_feature (61)..(61): /note="Nucleotide may be methylated to form 5-methylcytosine"
ggaggctggagctcctgggccaaagggcattctggagtttggaaccaaatcagcagttcacggaatggcctgagcctggtggtgacctcacagtttcagagagaaactgggaggaactgtgc

SEQ ID NO: 10971 - DNA, 122 bp, Homo sapiens
  misc_feature (61)..(62): /note="This region represents a CpG dinucleotide"
  misc_feature (61)..(61): /note="Nucleotide may be methylated to form 5-methylcytosine"
gggagtaatgaggactgagtcacttaggaacagccaagaggccactcctgggcagcttagcgcaatcagcaccctgtgtgaaataataaccacttctactgaggactcccagtgtgccggcc

SEQ ID NO: 10972 - DNA, 122 bp, Homo sapiens
  misc_feature (61)..(62): /note="This region represents a CpG dinucleotide"
  misc_feature (61)..(61): /note="Nucleotide may be methylated to form 5-methylcytosine"
cggtaatctaggactcccaggctttcaggaagcttaagccctggcccaaccttgattttacgtgacttcatagaaggtcctcattaccctagatgtcatatttatggacttcacaatggcat

SEQ ID NO: 10973 - DNA, 122 bp, Homo sapiens
  misc_feature (61)..(62): /note="This region represents a CpG dinucleotide"
  misc_feature (61)..(61): /note="Nucleotide may be methylated to form 5-methylcytosine"
aacatgattcatcaaccagctgtctgccttaaaggcctgtaagcctgaggtcatgttttgcgtaaataaatgctgacatgccaaagtggcacaatggatttctttcctaagcactagagttg

SEQ ID NO: 10974 - DNA, 122 bp, Homo sapiens
  misc_feature (61)..(62): /note="This region represents a CpG dinucleotide"
  misc_feature (61)..(61): /note="Nucleotide may be methylated to form 5-methylcytosine"
agtatagagatctgcccattgtctctttgagtatagacctgcccatctggttctgcagagcgcattaactatgtaacttcaggtcattttacctttttgaacttcggtctcctcatttgtga

SEQ ID NO: 10975 - DNA, 122 bp, Homo sapiens
  misc_feature (61)..(62): /note="This region represents a CpG dinucleotide"
  misc_feature (61)..(61): /note="Nucleotide may be methylated to form 5-methylcytosine"
catggcaatattgttcctttagcagagaagccactttatcttcttttgtaacacacagaacgaaggactacatgtttaaaaggcagttggaggactaacaagcttccactgcactgtgagcc

SEQ ID NO: 10976 - DNA, 122 bp, Homo sapiens
  misc_feature (61)..(62): /note="This region represents a CpG dinucleotide"
  misc_feature (61)..(61): /note="Nucleotide may be methylated to form 5-methylcytosine"
aaaaaaaaaaaaagcaaccaaacaggtaaaatttacattacacatttccacacaaatctacgtttattctgtatctattattggcatctcttcattttatccatcaaaaaaaagaatgcaga

SEQ ID NO: 10977 - DNA, 122 bp, Homo sapiens
  misc_feature (61)..(62): /note="This region represents a CpG dinucleotide"
  misc_feature (61)..(61): /note="Nucleotide may be methylated to form 5-methylcytosine"
acagaataattacatctgacttggaggagttgggagtgaaaacaatttagaagagccttacgaaggaggtaatcatttgtagaatgagtcagattttgacgagcagtactgaacattctagg

SEQ ID NO: 10978 - DNA, 122 bp, Homo sapiens
  misc_feature (61)..(62): /note="This region represents a CpG dinucleotide"
  misc_feature (61)..(61): /note="Nucleotide may be methylated to form 5-methylcytosine"
aaaagaaaaaaactagatagacaagacctgggccttaaagtctttctgtttcacagagcacgctgagtaatataaaactggatgatagataactaaatctctttttgtgccctattcaaaat

SEQ ID NO: 10979 - DNA, 122 bp, Homo sapiens
  misc_feature (61)..(62): /note="This region represents a CpG dinucleotide"
  misc_feature (61)..(61): /note="Nucleotide may be methylated to form 5-methylcytosine"
agtggttcctccaaagggaaaaaaatgacacaagaaggtgtgacctttactgactagccacgcagaaattcaaatgagctgaacaggaatgcagctaaggtgttctcgccctgtgtgtagtc

SEQ ID NO: 10980 - DNA, 122 bp, Homo sapiens
  misc_feature (61)..(62): /note="This region represents a CpG dinucleotide"
  misc_feature (61)..(61): /note="Nucleotide may be methylated to form 5-methylcytosine"
ttcaaaggggtatgcaagtactctagttcaagaaccaggaggctcagtataatccacactcgctgtggcctggcttggccactgggactgtcagaggcattcgaaccagaacaacttcatct

SEQ ID NO: 10981 - DNA, 122 bp, Homo sapiens
  misc_feature (61)..(62): /note="This region represents a CpG dinucleotide"
  misc_feature (61)..(61): /note="Nucleotide may be methylated to form 5-methylcytosine"
cagtgagtactcaataaatagcagctacatcattatcacggctattcttacttgctagtgcgttcgggctgtcatctccctgtgcctactttacagtcatctccattgtgataattaccctg

SEQ ID NO: 10982 - DNA, 122 bp, Homo sapiens
  misc_feature (61)..(62): /note="This region represents a CpG dinucleotide"
  misc_feature (61)..(61): /note="Nucleotide may be methylated to form 5-methylcytosine"
ctgggtggcgcaggtgggagaagagtctgagagcccggggagacttcagggccagaggctcgcccagccccagcacatggtagtatacctaagagagggagaagagcttagaaatggagtca

SEQ ID NO: 10983 - DNA, 122 bp, Homo sapiens
  misc_feature (61)..(62): /note="This region represents a CpG dinucleotide"
  misc_feature (61)..(61): /note="Nucleotide may be methylated to form 5-methylcytosine"
acaagaggaaaatcacaagtcatcgcccacccccattgtgattcagaagcttacagaccacgctagcaaaacaggttgtggaagtagggaaaataattctattactagggagaatgaatgga

SEQ ID NO: 10984 - DNA, 122 bp, Homo sapiens
  misc_feature (61)..(62): /note="This region represents a CpG dinucleotide"
  misc_feature (61)..(61): /note="Nucleotide may be methylated to form 5-methylcytosine"
caaactagacacgggcatcaagggagactggcagacgtccatcctggtgccttcagcaggcgagcatctccagccgggaacaatgccagtgcctgagcctcaagataagagccctctgcctt

SEQ ID NO: 10985 - DNA, 122 bp, Homo sapiens
  misc_feature (61)..(62): /note="This region represents a CpG dinucleotide"
  misc_feature (61)..(61): /note="Nucleotide may be methylated to form 5-methylcytosine"
aggcagagttgggaatattacatccattatcattccacaaaatgtaagatcctgtgaggacgcgtggtggcgctgcaggataagaaggcacaaaccagaaccgcagctgcagctccattaac

SEQ ID NO: 10986 - DNA, 122 bp, Homo sapiens
  misc_feature (61)..(62): /note="This region represents a CpG dinucleotide"
  misc_feature (61)..(61): /note="Nucleotide may be methylated to form 5-methylcytosine"
tgtcttctcttgggtaaacaactctggctcccttaactggatctccagtgacagtgacatcgttttaaatcctttcactttttttttttttggaggcagagtcttgctctagtggtgatatc

SEQ ID NO: 10987 - DNA, 122 bp, Homo sapiens
  misc_feature (61)..(62): /note="This region represents a CpG dinucleotide"
  misc_feature (61)..(61): /note="Nucleotide may be methylated to form 5-methylcytosine"
tgctgacagccaagtttccaaggttttcattcaacctaatactcatttttggtcatattacggctttgagcaaaatgctgaacatgaagaagctgaattgaagatgatactaagtggtgaca

SEQ ID NO: 10988 - DNA, 122 bp, Homo sapiens
  misc_feature (61)..(62): /note="This region represents a CpG dinucleotide"
  misc_feature (61)..(61): /note="Nucleotide may be methylated to form 5-methylcytosine"
ggcaggggcccccatttgcctggcactgaaattatattagtatctttactgtatgagcaccgtgcccatcagggcaagctgtgactcctgtcaccaaacactcaggaaccattgcttttggg

SEQ ID NO: 10989 - DNA, 122 bp, Homo sapiens
  misc_feature (61)..(62): /note="This region represents a CpG dinucleotide"
  misc_feature (61)..(61): /note="Nucleotide may be methylated to form 5-methylcytosine"
ggagcatgaagataaggtgattgataaaagcaagaggaagctatggaagttatctagacacgaggacctgcatgtgcaaaggcctggaagtgacagagtgtatggtttactcaagaacaagt

SEQ ID NO: 10990 - DNA, 122 bp, Homo sapiens
  misc_feature (61)..(62): /note="This region represents a CpG dinucleotide"
  misc_feature (61)..(61): /note="Nucleotide may be methylated to form 5-methylcytosine"
aagtgttagcaatcattctgctactgtgtgcaaggctttatccatgctctaccaaccacccgtgatgggtctgtcaaccagaaagtatctgaggcagggctccatcaatttagaagtttatt

SEQ ID NO: 10991 - DNA, 122 bp, Homo sapiens
  misc_feature (61)..(62): /note="This region represents a CpG dinucleotide"
  misc_feature (61)..(61): /note="Nucleotide may be methylated to form 5-methylcytosine"
ctttacacctgttaggatggccatcaaaaagtcaaaagataataggagttggagaggatgcgaagaaaaaggaaccctgttacactgttggtgggactgtacattcgggcagcctctctggg

SEQ ID NO: 10992 - DNA, 122 bp, Homo sapiens
  misc_feature (61)..(62): /note="This region represents a CpG dinucleotide"
  misc_feature (61)..(61): /note="Nucleotide may be methylated to form 5-methylcytosine"
ttcaccaaatccatttctctttcctccagggcacttagtcaccttttccagcctcccttacggttagatattgccactgagtctggccttatggaatgcagctatgtcacttccaggtctga

SEQ ID NO: 10993 - DNA, 122 bp, Homo sapiens
  misc_feature (61)..(62): /note="This region represents a CpG dinucleotide"
  misc_feature (61)..(61): /note="Nucleotide may be methylated to form 5-methylcytosine"
atttttttcagggcctgaaattatgctttcatgttctcatgccaaagaaaggtaagttcgcgtgagcctgggatctgtcctgccataggaattcttcacaggaactcttcacaggatttctg

SEQ ID NO: 10994 - DNA, 122 bp, Homo sapiens
  misc_feature (61)..(62): /note="This region represents a CpG dinucleotide"
  misc_feature (61)..(61): /note="Nucleotide may be methylated to form 5-methylcytosine"
gccttactaggtttcctgactcagtctgttagtattatatcatatccttttttgcctaatcgtatttctacctggttatcttcaatcatgtctatccaatggagtcttgctaagagacccaa

SEQ ID NO: 10995 - DNA, 122 bp, Homo sapiens
  misc_feature (61)..(62): /note="This region represents a CpG dinucleotide"
  misc_feature (61)..(61): /note="Nucleotide may be methylated to form 5-methylcytosine"
ccctttagtgccaagatgtggagtagaacccagatccattggcaacttactgatgttaaccgaagtgtattgtatgccacctttgacagtcagagctcactagaggataaggaagctctgac

SEQ ID NO: 10996 - DNA, 122 bp, Homo sapiens
  misc_feature (61)..(62): /note="This region represents a CpG dinucleotide"
  misc_feature (61)..(61): /note="Nucleotide may be methylated to form 5-methylcytosine"
caccaaagaaaaaaaaaacccaaatatcataagttcacttttgatagtcatgataacaaccgtaccactgtacagttgtttttatcttttctcatctcattttatcctctcagctctgggat

SEQ ID NO: 10997 - DNA, 122 bp, Homo sapiens
  misc_feature (61)..(62): /note="This region represents a CpG dinucleotide"
  misc_feature (61)..(61): /note="Nucleotide may be methylated to form 5-methylcytosine"
ggctgtgagcctctgatttcgacagtgcattcagaatcatctttgtactttctaatctagcgttccaggttatccaggatgcctaggtcatggtactgatataggaagggaattccagaaac

SEQ ID NO: 10998 - DNA, 122 bp, Homo sapiens
  misc_feature (61)..(62): /note="This region represents a CpG dinucleotide"
  misc_feature (61)..(61): /note="Nucleotide may be methylated to form 5-methylcytosine"
acaatacttgtgcaagtagatctaaagccctatatggaatttattgctttagccttgtagcgttaatcacttgtggctagaatagaaggctccgtttaaaaaaagaaaaggctgggtacagt

SEQ ID NO: 10999 - DNA, 122 bp, Homo sapiens
  misc_feature (61)..(62): /note="This region represents a CpG dinucleotide"
  misc_feature (61)..(61): /note="Nucleotide may be methylated to form 5-methylcytosine"
ctcacctcccattagtcacttagggttatcagatcacctgtcatggtatcccagcacttacgttgtagtaaaccttatgtcaaagagaatctataacggggtgcctagtcttttggcttccc

SEQ ID NO: 11000 - DNA, 122 bp, Homo sapiens
  misc_feature (61)..(62): /note="This region represents a CpG dinucleotide"
  misc_feature (61)..(61): /note="Nucleotide may be methylated to form 5-methylcytosine"
caagccttaggtcactgctctcttcaaactgctgaactggttgagaaagactgagcttaacggatagaacctgctagccctgcagccattggggttttgtgactactgagtcccagagcctc

SEQ ID NO: 11001 - DNA, 122 bp, Homo sapiens
  misc_feature (61)..(62): /note="This region represents a CpG dinucleotide"
  misc_feature (61)..(61): /note="Nucleotide may be methylated to form 5-methylcytosine"
aggacctgtccccatgacccaaacacctcccaccacaccctacttctcaacacagacacacgggggaatcaaatttcaacatgagatttggtgaagacaaacaaaccatatcctaaccatag

SEQ ID NO: 11002 - DNA, 122 bp, Homo sapiens
  misc_feature (61)..(62): /note="This region represents a CpG dinucleotide"
  misc_feature (61)..(61): /note="Nucleotide may be methylated to form 5-methylcytosine"
cacctcttattgggagaatgaccttgtgtaaatgacatcacttctgtgtctcagttaacacgcctgtaaaatggaaataatatctatttgtgatggttagttttatgtgccaacttgactga

SEQ ID NO: 11003 - DNA, 122 bp, Homo sapiens
  misc_feature (61)..(62): /note="This region represents a CpG dinucleotide"
  misc_feature (61)..(61): /note="Nucleotide may be methylated to form 5-methylcytosine"
tgctttttaacattccttttgtcctacagatcatataaatgggctgggtacagaggctcacgcctgtaatcccagcactttgggaggccaaggcaggtggattacttgaggtcaggagttca

SEQ ID NO: 11004 - DNA, 122 bp, Homo sapiens
  misc_feature (61)..(62): /note="This region represents a CpG dinucleotide"
  misc_feature (61)..(61): /note="Nucleotide may be methylated to form 5-methylcytosine"
tgctttccaggacagcacttgtctcactacttggccaacatcaagtagtaattgttaaaacgaaatgagctgggtgtatgaccgggcatggtggctcgtgcctgtaaatccagcactttggg

SEQ ID NO: 11005 - DNA, 122 bp, Homo sapiens
  misc_feature (61)..(62): /note="This region represents a CpG dinucleotide"
  misc_feature (61)..(61): /note="Nucleotide may be methylated to form 5-methylcytosine"
tctggggctgggactgggacagtgacaatgactgggatagtgctgtgctggccctcctggcgctggctgtggtggctgccacagcgctggccttacactggtttggctccgggcacgatcaa

SEQ ID NO: 11006 - DNA, 122 bp, Homo sapiens
  misc_feature (61)..(62): /note="This region represents a CpG dinucleotide"
  misc_feature (61)..(61): /note="Nucleotide may be methylated to form 5-methylcytosine"
cctcttgtttctctgatgattcaatctagtgacttatttaggataacaattggagaatatcgtagctaaataccatctcactgaggctcttttaggtgaccagagaagtagtaagggaaaga

SEQ ID NO: 11007 - DNA, 122 bp, Homo sapiens
  misc_feature (61)..(62): /note="This region represents a CpG dinucleotide"
  misc_feature (61)..(61): /note="Nucleotide may be methylated to form 5-methylcytosine"
aatctggaagtatgaaaatatgattacaagttccattcattatttgtgttctgtggttttcgtattgttcttgaaatttacttcctgcctgcctgaagttttgtattatgaatttagtgtca

SEQ ID NO: 11008 - DNA, 122 bp, Homo sapiens
  misc_feature (61)..(62): /note="This region represents a CpG dinucleotide"
  misc_feature (61)..(61): /note="Nucleotide may be methylated to form 5-methylcytosine"
tttagcagcatccctggcctgtctgccactagatgccagtagcaagtccttactctttcccgcttcaatcctctctcaagtgtcacaaccaggtctctccagacattgccaaattaccgcgc

SEQ ID NO: 11009 - DNA, 122 bp, Homo sapiens
  misc_feature (61)..(62): /note="This region represents a CpG dinucleotide"
  misc_feature (61)..(61): /note="Nucleotide may be methylated to form 5-methylcytosine"
tttcctgtttgcctgttgcttttctaccttggggtgctgtagctacccatttggcttgctcgctcctaaagctatgactgcagccatgtagtctttcgtgtttcacttgaaacatgctgaca

SEQ ID NO: 11010 - DNA, 122 bp, Homo sapiens
  misc_feature (61)..(62): /note="This region represents a CpG dinucleotide"
  misc_feature (61)..(61): /note="Nucleotide may be methylated to form 5-methylcytosine"
ttaaacccaatggagggcagcttccaggcacaggtcacggggaaattttggagggtagtacgtattgtattgcttgaaagttgttccatgaccaagaggttaaatgccttcttttgccaaga

SEQ ID NO: 11011 - DNA, 122 bp, Homo sapiens
  misc_feature (61)..(62): /note="This region represents a CpG dinucleotide"
  misc_feature (61)..(61): /note="Nucleotide may be methylated to form 5-methylcytosine"
tgcaagccaagtatgaactacacaaacaggttatataacaagtggaggtatgcacctgcacgccaaactcgctgagtcacgcaggcctgggtatccatctcagcctagtccttgaccaaagc

SEQ ID NO: 11012 - DNA, 122 bp, Homo sapiens
  misc_feature (61)..(62): /note="This region represents a CpG dinucleotide"
  misc_feature (61)..(61): /note="Nucleotide may be methylated to form 5-methylcytosine"
ccagatggacccctgctcttctgggaggacaaactggaactggtctggatccagctgcgacgctgctagaggagaacgaggcatcttttgccctccaacatctggagcctgcctctccagga

SEQ ID NO: 11013 - DNA, 122 bp, Homo sapiens
  misc_feature (61)..(62): /note="This region represents a CpG dinucleotide"
  misc_feature (61)..(61): /note="Nucleotide may be methylated to form 5-methylcytosine"
gaccaatccctggggtttctggtcggcctgtggatgtgtcccggtcaggcctaggtcaggcgcctgacagcgtcacctgtggccactgagaatcatcctccttcaggagtcccagtcagtca

SEQ ID NO: 11014 - DNA, 122 bp, Homo sapiens
  misc_feature (61)..(62): /note="This region represents a CpG dinucleotide"
  misc_feature (61)..(61): /note="Nucleotide may be methylated to form 5-methylcytosine"
caaagccattctgtgactcgctttcatttgcttcctacggtaacccggtaagataggtgtcgtcattcccatttcagagaagaataaactgaggctcagagaaacttagagatgtgccagga

SEQ ID NO: 11015 - DNA, 122 bp, Homo sapiens
  misc_feature (61)..(62): /note="This region represents a CpG dinucleotide"
  misc_feature (61)..(61): /note="Nucleotide may be methylated to form 5-methylcytosine"
agctgcaaacgggataacacaagtgccacccactttttgttttctccaagtgcaaataaacgtgtaaatccagtagaactatattttcccaaaatattgatttaaaaacaaaaatagtagca

SEQ ID NO: 11016 - DNA, 122 bp, Homo sapiens
  misc_feature (61)..(62): /note="This region represents a CpG dinucleotide"
  misc_feature (61)..(61): /note="Nucleotide may be methylated to form 5-methylcytosine"
tgcttgttgaggtaatgcaaactaaggagaaagaggtgttagcttcctccgaggccagggcgttttaggctgcaggtaaaccatggatgtggttctacagatgttgccacaacaggaagaca

SEQ ID NO: 11017 - DNA, 122 bp, Homo sapiens
  misc_feature (61)..(62): /note="This region represents a CpG dinucleotide"
  misc_feature (61)..(61): /note="Nucleotide may be methylated to form 5-methylcytosine"
tactttctaataagcctccaaaggacaatggtgattagtatttcctgggtttctctaccccgcagctgaagacctgcagatggatccagcacaaaagggacctgccatgcacactctctgga

SEQ ID NO: 11018 - DNA, 122 bp, Homo sapiens
  misc_feature (61)..(62): /note="This region represents a CpG dinucleotide"
  misc_feature (61)..(61): /note="Nucleotide may be methylated to form 5-methylcytosine"
gtagcatccgcaaagtaattagcataatgtttcacaaaagtaggcactcgacgaatttgtcgttagctcatttcctcttgtattctatagaacacagatttcagcatgctaacaaaattaac

SEQ ID NO: 11019 - DNA, 122 bp, Homo sapiens
  misc_feature (61)..(62): /note="This region represents a CpG dinucleotide"
  misc_feature (61)..(61): /note="Nucleotide may be methylated to form 5-methylcytosine"
gaaaataacaacttttatctgcccagtaaggacaactaacacctagtatcataatcatttcgtaagagacaggtaatttcatcaccgagtgcatatgttttctaatgctcttatatcaaatt

SEQ ID NO: 11020 - DNA, 122 bp, Homo sapiens
  misc_feature (61)..(62): /note="This region represents a CpG dinucleotide"
  misc_feature (61)..(61): /note="Nucleotide may be methylated to form 5-methylcytosine"
ttactagttcacatagcaaaaaaattctgaggtagggtggtttcaggttggttgattcagcgtctcaataatattatcaaagactcagattctggccaggcacaatggctcatgcctataat

SEQ ID NO: 11021 - DNA, 122 bp, Homo sapiens
  misc_feature (61)..(62): /note="This region represents a CpG dinucleotide"
  misc_feature (61)..(61): /note="Nucleotide may be methylated to form 5-methylcytosine"
ctggttcagcagcaagttggaaaccatcatgctggcagggctcctttggccaccaagccccgatccccaccttctccccttggatgtgcctgaagccatgtctcagtcccatccttgaagaa

SEQ ID NO: 11022 - DNA, 122 bp, Homo sapiens
  misc_feature (61)..(62): /note="This region represents a CpG dinucleotide"
  misc_feature (61)..(61): /note="Nucleotide may be methylated to form 5-methylcytosine"
cctcgtctttaaaccagaacagacacaaccttggtcaggaaatttcacattctgaaagtccgtatcacctaacaaggaaaaccttcttatcctggccatgaatctagcagtgatctttcata

SEQ ID NO: 11023 - DNA, 122 bp, Homo sapiens
  misc_feature (61)..(62): /note="This region represents a CpG dinucleotide"
  misc_feature (61)..(61): /note="Nucleotide may be methylated to form 5-methylcytosine"
cattaatatcttgcataaccatgatgcatgtcaaaaccagagttgcacagctcttaaatccgtcatccacgttgagcatataaaagcatctggctactggaaatgaaaataagggatttttg

SEQ ID NO: 11024 - DNA, 122 bp, Homo sapiens
  misc_feature (61)..(62): /note="This region represents a CpG dinucleotide"
  misc_feature (61)..(61): /note="Nucleotide may be methylated to form 5-methylcytosine"
caggaaggaatcatactcacaaagaaagtcttcactctgctgaaggcatctcggagatctcgaagcatgttaggcaggttgcctgggaagtgggtgcagctgttctcagactgggtgccctg

SEQ ID NO: 11025 - DNA, 122 bp, Homo sapiens
  misc_feature (61)..(62): /note="This region represents a CpG dinucleotide"
  misc_feature (61)..(61): /note="Nucleotide may be methylated to form 5-methylcytosine"
taaccagtgttgcctcattcagctcaaacagatttcatagccaaagcaaaaggactggtacggtagtctgtggaaaccaggaagataaaacaacagccacaaaagagaaaatcaagagtgtt

SEQ ID NO: 11026 - DNA, 122 bp, Homo sapiens
  misc_feature (61)..(62): /note="This region represents a CpG dinucleotide"
  misc_feature (61)..(61): /note="Nucleotide may be methylated to form 5-methylcytosine"
tcatttaacatggtacatgtactaattctaaactttacaacaatcctgtgaggtaagtaacgaattgtcattctcattttacagtggaggataaagaggctgaaggagtttaagtcatttgc

SEQ ID NO: 11027 - DNA, 122 bp, Homo sapiens
  misc_feature (61)..(62): /note="This region represents a CpG dinucleotide"
  misc_feature (61)..(61): /note="Nucleotide may be methylated to form 5-methylcytosine"
tgtattaactcaattattcctcacaataaacctagcctctgtattttacaattagagaaacggaaccattgaggattacaataactcatccaaggccacacagttagtgaggggcagagcca

SEQ ID NO: 11028 - DNA, 122 bp, Homo sapiens
  misc_feature (61)..(62): /note="This region represents a CpG dinucleotide"
  misc_feature (61)..(61): /note="Nucleotide may be methylated to form 5-methylcytosine"
aaatgactcatctgctctcttcaaaaacatcaatgtcatggtacaaaggaggacaagaaacggttccagattaaagatgactaaagagacaaggaaaccagaggcaacgcagaatccgaagt

SEQ ID NO: 11029 - DNA, 122 bp, Homo sapiens
  misc_feature (61)..(62): /note="This region represents a CpG dinucleotide"
  misc_feature (61)..(61): /note="Nucleotide may be methylated to form 5-methylcytosine"
ttcccaaaggaaccttacaggaatgcttttactactagaaaacatacagcagcagctgggcgcagtggctcacgcctgtaatcccagcactttgtgaggccgaggcagttggatcatgaggt

SEQ ID NO: 11030 - DNA, 122 bp, Homo sapiens
  misc_feature (61)..(62): /note="This region represents a CpG dinucleotide"
  misc_feature (61)..(61): /note="Nucleotide may be methylated to form 5-methylcytosine"
tctgttgattactaactgaagcctcaattccccaatctttaaaatagggataataatacccgtatcataggagtgttatgttaaacaagaaaatctatgtgagaatgtcactgtctgcttgc

SEQ ID NO: 11031 - DNA, 122 bp, Homo sapiens
  misc_feature (61)..(62): /note="This region represents a CpG dinucleotide"
  misc_feature (61)..(61): /note="Nucleotide may be methylated to form 5-methylcytosine"
actgcagatttaggggttccatccaaacattctgataagaaaggccaagccagcagatcgcgcctgcatatctgccagagagcctggaagaatgtcagcgctttcctgctgcttcctggtca

SEQ ID NO: 11032 - DNA, 122 bp, Homo sapiens
  misc_feature (61)..(62): /note="This region represents a CpG dinucleotide"
  misc_feature (61)..(61): /note="Nucleotide may be methylated to form 5-methylcytosine"
gtttctgtgggtcagaaggccaagaacaatgtggcttagctggttccctgcttagggtttcgtaaggctgaaatgatggtgtcagcagtattgtgttcctttctggtgactctggagatgaa

SEQ ID NO: 11033 - DNA, 122 bp, Homo sapiens
  misc_feature (61)..(62): /note="This region represents a CpG dinucleotide"
  misc_feature (61)..(61): /note="Nucleotide may be methylated to form 5-methylcytosine"
tggggccattagtaaacatgttctgtgccacactgacaaactgtgctatgagaaagtacacgcttccagatattatgattcatagatttgcaaatcttcacatggctggtgtgacaaatagt

SEQ ID NO: 11034 - DNA, 122 bp, Homo sapiens
  misc_feature (61)..(62): /note="This region represents a CpG dinucleotide"
  misc_feature (61)..(61): /note="Nucleotide may be methylated to form 5-methylcytosine"
tccttgtggattcatatggaaatggacacctgccatgtttgcaggcagaaaaacaggcttcgaattccacccacacctgatggctattctctgcctggaacgcctctcttaccctcccatgg

SEQ ID NO: 11035 - DNA, 122 bp, Homo sapiens
  misc_feature (61)..(62): /note="This region represents a CpG dinucleotide"
  misc_feature (61)..(61): /note="Nucleotide may be methylated to form 5-methylcytosine"
ctcaactgtaaggacatgtgactggtctccttataagaagaggagattaaaacacagacacgcacagaaggagagatacatgcaaacatcagaggaaaacagctatctacaagccaaggaga

SEQ ID NO: 11036 - DNA, 122 bp, Homo sapiens
  misc_feature (61)..(62): /note="This region represents a CpG dinucleotide"
  misc_feature (61)..(61): /note="Nucleotide may be methylated to form 5-methylcytosine"
accccggaggccacaaacggtacaggaacacagccaggagtcacgctgcacacccccacccgtacctgaggcagactgggattgaaattttatttttaaaaggtaaagctgttttattaaac

SEQ ID NO: 11037 - DNA, 122 bp, Homo sapiens
  misc_feature (61)..(62): /note="This region represents a CpG dinucleotide"
  misc_feature (61)..(61): /note="Nucleotide may be methylated to form 5-methylcytosine"
ccggcaggatgcttttctagccctgactcagaaagcccgggggaagagagtgggtggagacgtgacaagtgataaactgaaagactggctgatttcacggcagcggtactggggcacaccaa

SEQ ID NO: 11038 - DNA, 122 bp, Homo sapiens
  misc_feature (61)..(62): /note="This region represents a CpG dinucleotide"
  misc_feature (61)..(61): /note="Nucleotide may be methylated to form 5-methylcytosine"
aaagaaaggtgaagctgtaagttttggtgccacacccagtccctgaactacaaaggtttacggagttttagcctaggactgagttgtactggcaggttgggccaagtgtgagtgcaaggaga

SEQ ID NO: 11039 - DNA, 122 bp, Homo sapiens
  misc_feature (61)..(62): /note="This region represents a CpG dinucleotide"
  misc_feature (61)..(61): /note="Nucleotide may be methylated to form 5-methylcytosine"
gtgagacagtgagcatggggtcggaaatatgtcagctccatagcttactacctttgagaccgtgaataagttaatgagccttgctaagcctcagtttcctcaaatgtaaaatggaatagtac

SEQ ID NO: 11040 - DNA, 122 bp, Homo sapiens
  misc_feature (61)..(62): /note="This region represents a CpG dinucleotide"
  misc_feature (61)..(61): /note="Nucleotide may be methylated to form 5-methylcytosine"
cttgtctgagtagtcctccaagcacttcagggagttgcttaggggtatttaagactatagcgttgatgtttgattcagtcacttgggacatgagtttgaaggaacagaatgagaggtttagc

SEQ ID NO: 11041 - DNA, 122 bp, Homo sapiens
  misc_feature (61)..(62): /note="This region represents a CpG dinucleotide"
  misc_feature (61)..(61): /note="Nucleotide may be methylated to form 5-methylcytosine"
tccctccaagggattggcagtggtacccaagcaacctctccttttgtctttgtctcttttcgttatatccctcattcctctcttagaattcaggctttttcttttcttttcttttctttttt

SEQ ID NO: 11042 - DNA, 122 bp, Homo sapiens
  misc_feature (61)..(62): /note="This region represents a CpG dinucleotide"
  misc_feature (61)..(61): /note="Nucleotide may be methylated to form 5-methylcytosine"
ctcattcattcaatcaatcagtcaaccagttggtcagtcaacagacatatctcaggcacacgtgccaggcattagtatctatgggtggaggctgttaagtaagctgattttcattttcattt

SEQ ID NO: 11043 - DNA, 122 bp, Homo sapiens
  misc_feature (61)..(62): /note="This region represents a CpG dinucleotide"
  misc_feature (61)..(61): /note="Nucleotide may be methylated to form 5-methylcytosine"
tatcgagtgtcttgaatgtggccaggaactgcatatgataatctcatttaatcctcccagcgcaatgatcctgtttacccacagagcaagtgaggcccagggaggtttagtaatttgcccaa

SEQ ID NO: 11044 - DNA, 122 bp, Homo sapiens
  misc_feature (61)..(62): /note="This region represents a CpG dinucleotide"
  misc_feature (61)..(61): /note="Nucleotide may be methylated to form 5-methylcytosine"
cttgggagaagcttggcggtcataagcttgagctcacctatcaggtagagagcttccacacgctcctgggaatttccttgacctagcttgaccctgtaaggcacaagttgctttcctttcac

SEQ ID NO: 11045 - DNA, 122 bp, Homo sapiens
  misc_feature (61)..(62): /note="This region represents a CpG dinucleotide"
  misc_feature (61)..(61): /note="Nucleotide may be methylated to form 5-methylcytosine"
ctggagtcaaaacaaaccttatagatttgcctcaaaaactaccactgcaaagaggcttgacgtcaactggattagactgtgggacaatatatgcccccagggcattattgaaatgaatgagg

SEQ ID NO: 11046 - DNA, 122 bp, Homo sapiens
  misc_feature (61)..(62): /note="This region represents a CpG dinucleotide"
  misc_feature (61)..(61): /note="Nucleotide may be methylated to form 5-methylcytosine"
tctcattagcagatgctctagctggtttccatgaaggctttccacagtgacttccatagtcgtcataggcgactactatcagattccatctcaacgtttcacattcacaggcagaggctcca

SEQ ID NO: 11047 - DNA, 122 bp, Homo sapiens
  misc_feature (61)..(62): /note="This region represents a CpG dinucleotide"
  misc_feature (61)..(61): /note="Nucleotide may be methylated to form 5-methylcytosine"
agcataatgcctggcccagctaaccactgaatgaatggtagctgttaacattaaccaatgcgtcattaaatcttcttttttgtgaggggactgggggattgttggctcccctgtggtctgct

SEQ ID NO: 11048 - DNA, 122 bp, Homo sapiens
  misc_feature (61)..(62): /note="This region represents a CpG dinucleotide"
  misc_feature (61)..(61): /note="Nucleotide may be methylated to form 5-methylcytosine"
ggaggctctgtgagaccccaactaatcccaaaggagggaccaagtccaggacttaggggacgaagttctggccaggtcctaccatgactctcacagtgcctgtttctcactcatcactctag

SEQ ID NO: 11049 - DNA, 122 bp, Homo sapiens
  misc_feature (61)..(62): /note="This region represents a CpG dinucleotide"
  misc_feature (61)..(61): /note="Nucleotide may be methylated to form 5-methylcytosine"
ttccagcgcttggtgagtgacttcattaaatatgcaatggctgttgggtggcttctcagacgatggttcagttccttgtggaattgcattattactagaggtgtaaaaccaggcagacaagc

SEQ ID NO: 11050 - DNA, 122 bp, Homo sapiens
  misc_feature (61)..(62): /note="This region represents a CpG dinucleotide"
  misc_feature (61)..(61): /note="Nucleotide may be methylated to form 5-methylcytosine"
gagcagttccccggagacattaccaagacttctcacctgacagtccagagcactcccaggcgtgggtaggcctcaacctgtccaactggcttttggaggtggaccggagccggggagcccct

SEQ ID NO: 11051 - DNA, 122 bp, Homo sapiens
  misc_feature (61)..(62): /note="This region represents a CpG dinucleotide"
  misc_feature (61)..(61): /note="Nucleotide may be methylated to form 5-methylcytosine"
ggagagtgctgattggttaggtcagagatgaagtcatagggagtggaagctgtccttttgcgctgagtcagttactgggtaggggccactagaccagatgagccagtctatcgatctgggtg

SEQ ID NO: 11052 - DNA, 122 bp, Homo sapiens
  misc_feature (61)..(62): /note="This region represents a CpG dinucleotide"
  misc_feature (61)..(61): /note="Nucleotide may be methylated to form 5-methylcytosine"
cccaatctaaccagtacaagatcagctaacccactctccctaatgccacaggtggtaacacgtcattttcagcaactgtctacagagacatccatgacacctcccctccctcactcttcata

SEQ ID NO: 11053 - DNA, 122 bp, Homo sapiens
  misc_feature (61)..(62): /note="This region represents a CpG dinucleotide"
  misc_feature (61)..(61): /note="Nucleotide may be methylated to form 5-methylcytosine"
gaagaaagattacatttccagtccagtttctaatcccaagtatccatgcacccaggatggcgggaaaagggaaaaggcggtaccttaaatgagggaaggacatctcagtcttggccagttct

SEQ ID NO: 11054 - DNA, 122 bp, Homo sapiens
  misc_feature (61)..(62): /note="This region represents a CpG dinucleotide"
  misc_feature (61)..(61): /note="Nucleotide may be methylated to form 5-methylcytosine"
caaagagcactgggctgggagtctgaaccctgccggcaggtgaggctccttcttagcagacgtgactcatttgtggagtagttgcattagtcaggggaggctaggccatgccaaggtgacaa

SEQ ID NO: 11055 - DNA, 122 bp, Homo sapiens
  misc_feature (61)..(62): /note="This region represents a CpG dinucleotide"
  misc_feature (61)..(61): /note="Nucleotide may be methylated to form 5-methylcytosine"
aaccagggcacatgtgctcagcattgccttccaaagttctttctcaaccttgtaagttctcgttctgagggcatataaagtatgtttatgcaatcccttgtgaaaatagatgaggcaatatg

SEQ ID NO: 11056 - DNA, 122 bp, Homo sapiens
  misc_feature (61)..(62): /note="This region represents a CpG dinucleotide"
  misc_feature (61)..(61): /note="Nucleotide may be methylated to form 5-methylcytosine"
actacctctagtctaaaccagggcagggcctggcaggcctctgggagaattgcctgtgaccgttaacatgtgggaggagcctgaggaacattcagaaaaaggaagaacgtctcaggaagtta

SEQ ID NO: 11057 - DNA, 122 bp, Homo sapiens
  misc_feature (61)..(62): /note="This region represents a CpG dinucleotide"
  misc_feature (61)..(61): /note="Nucleotide may be methylated to form 5-methylcytosine"
ccaagctttgcgttataacaagccagggaaggacctagggaggttcccttccctctggaacggaaatggaactttctctgagcttaggatttgtaaggcactgaaattaactacagctgggg

SEQ ID NO: 11058 - DNA, 122 bp, Homo sapiens
  misc_feature (61)..(62): /note="This region represents a CpG dinucleotide"
  misc_feature (61)..(61): /note="Nucleotide may be methylated to form 5-methylcytosine"
gcgttctcagctcccacacagtggcacacccctgagaaggttgagtcacgacctgtcatccgctgatcctagttaatgcatggtccccgcacagccaggcttaccttctgagcagcctccat

SEQ ID NO: 11059 - DNA, 122 bp, Homo sapiens
  misc_feature (61)..(62): /note="This region represents a CpG dinucleotide"
  misc_feature (61)..(61): /note="Nucleotide may be methylated to form 5-methylcytosine"
ctctggatgcttgcatttgacatacatgtgctcatcctgtgctcatcttacttgacctttcggcagcgttagataccactgtatactccctctattttgaaatactttcttcccttgccttt

SEQ ID NO: 11060 - DNA, 122 bp, Homo sapiens
  misc_feature (61)..(62): /note="This region represents a CpG dinucleotide"
  misc_feature (61)..(61): /note="Nucleotide may be methylated to form 5-methylcytosine"
tcaagagttctccagagatgcagaaccagaaagatacatacacagtcataccttgtttaacgatgggaatacgttctgagaaatgagtcatgaggttattttgtcattgtgtgaacatcaga

SEQ ID NO: 11061 - DNA, 122 bp, Homo sapiens
  misc_feature (61)..(62): /note="This region represents a CpG dinucleotide"
  misc_feature (61)..(61): /note="Nucleotide may be methylated to form 5-methylcytosine"
catgacaatctgggccacacagatggcagatctctgtttttaatgttacattctggctgtcgtgagtcatcaggaaattcattcatttcaatagcttctctgtgaataacactagcattggc

SEQ ID NO: 11062 - DNA, 122 bp, Homo sapiens
  misc_feature (61)..(62): /note="This region represents a CpG dinucleotide"
  misc_feature (61)..(61): /note="Nucleotide may be methylated to form 5-methylcytosine"
aatttccccttcccctctccacagtgggcaaggccacctcttcccaccccctggaacctccgtcggtcagggtaggccctcttgggagtttctgctggcccagtactggtcccgggggactt

SEQ ID NO: 11063 - DNA, 122 bp, Homo sapiens
  misc_feature (61)..(62): /note="This region represents a CpG dinucleotide"
  misc_feature (61)..(61): /note="Nucleotide may be methylated to form 5-methylcytosine"
gcctaattctgtgcacttgatgcataattgccagaccttttctacttaattggcccctggcgttggcccaccctgcctgccatatcactgttgatccctccagtgacggctaatttgaccta

SEQ ID NO: 11064 - DNA, 122 bp, Homo sapiens
  misc_feature (61)..(62): /note="This region represents a CpG dinucleotide"
  misc_feature (61)..(61): /note="Nucleotide may be methylated to form 5-methylcytosine"
aaactaaaccacctgtaaagaaagcatggggtgagaagcccccatcacctgtataaccctcggtatttctgttcactttaagagcctgccactgaaaacattcagtaaaggagtgaatcttc

SEQ ID NO: 11065 - DNA, 122 bp, Homo sapiens
  misc_feature (61)..(62): /note="This region represents a CpG dinucleotide"
  misc_feature (61)..(61): /note="Nucleotide may be methylated to form 5-methylcytosine"
gcccatgtggtgagctgctgaggcctcctgctgacaccatgtgtgtgagtcagtttggcacgctcctccagccctggtcaggccttcgaattatgcagccagggccgaggtccttactgtac

SEQ ID NO: 11066 - DNA, 122 bp, Homo sapiens
  misc_feature (61)..(62): /note="This region represents a CpG dinucleotide"
  misc_feature (61)..(61): /note="Nucleotide may be methylated to form 5-methylcytosine"
cttgactcttttacctgctgaacaagtgaaataacatctctgaaccttgagttccccatccgtgaaatgggaatgacaccagccttgaaggattgaatgacacaccacttgtggcacgccta

SEQ ID NO: 11067 - DNA, 122 bp, Homo sapiens
  misc_feature (61)..(62): /note="This region represents a CpG dinucleotide"
  misc_feature (61)..(61): /note="Nucleotide may be methylated to form 5-methylcytosine"
cccatgcttcagattcaaaggaggtctgtgaagggctgggctttgcttaacctttcacatcgcaaaacttcctgcctctctggcctcagacaaacacatcctccaggccagggttcagaagg

SEQ ID NO: 11068 - DNA, 122 bp, Homo sapiens
  misc_feature (61)..(62): /note="This region represents a CpG dinucleotide"
  misc_feature (61)..(61): /note="Nucleotide may be methylated to form 5-methylcytosine"
tcttgaaagtccatgacttttacataccctgttgtatgacttcaaataaacctttcttaacgtgcatagagacagagttgcatccacaaaattgcgcaggtccctaacctaaaattagacct

SEQ ID NO: 11069 - DNA, 122 bp, Homo sapiens
  misc_feature (61)..(62): /note="This region represents a CpG dinucleotide"
  misc_feature (61)..(61): /note="Nucleotide may be methylated to form 5-methylcytosine"
ataaaggcagactggcctcgttctgacactccctaagaaaaagttcaaagctgctcacctcgtcccatgttctcattctgcagatgggaaaactatctcagaggagttaagtaatgggctta

SEQ ID NO: 11070 - DNA, 122 bp, Homo sapiens
  misc_feature (61)..(62): /note="This region represents a CpG dinucleotide"
  misc_feature (61)..(61): /note="Nucleotide may be methylated to form 5-methylcytosine"
ctgggagaggctctagagcatggaggctttttcactgaaatctgtttgctcttctcagagcgtagcccaaggcgtgcaaatgtaaacacctgtaatgtaatgagaagtgagttggagatgag

SEQ ID NO: 11071 - DNA, 122 bp, Homo sapiens
  misc_feature (61)..(62): /note="This region represents a CpG dinucleotide"
  misc_feature (61)..(61): /note="Nucleotide may be methylated to form 5-methylcytosine"
atcaagttatacagaatgccatagaatttagggtcttttttagtgaattatttgtgaacacgctagcattgtttgtcctatctggatagtctttagcaagccttcagtgtaaggttatgagt

SEQ ID NO: 11072 - DNA, 122 bp, Homo sapiens
  misc_feature (61)..(62): /note="This region represents a CpG dinucleotide"
  misc_feature (61)..(61): /note="Nucleotide may be methylated to form 5-methylcytosine"
cctaactgtaattcctgttttcctttatccacctgattagactttgaagtccttaagacccggaataatgagcctgttattgttatctctgtaacacaggcattacatgcatacttacatag

SEQ ID NO: 11073 - DNA, 122 bp, Homo sapiens
  misc_feature (61)..(62): /note="This region represents a CpG dinucleotide"
  misc_feature (61)..(61): /note="Nucleotide may be methylated to form 5-methylcytosine"
ctaatcctttgggatgaaattcaaaatcattactcagcagcctgcatgatctgtccatcgcgcacctcagcagctcggtttgtgcccacatctctcttgttctctaagcagggttttgcggt

SEQ ID NO: 11074 - DNA, 122 bp, Homo sapiens
  misc_feature (61)..(62): /note="This region represents a CpG dinucleotide"
  misc_feature (61)..(61): /note="Nucleotide may be methylated to form 5-methylcytosine"
ctccttttaatcttgactttcacaaatacctggtggcaggtgtcatttccccattctacacgtacctgaggctcagagtgagacagcgactcacccaagatctcccagctacaaaatggcag

SEQ ID NO: 11075 - DNA, 122 bp, Homo sapiens
  misc_feature (61)..(62): /note="This region represents a CpG dinucleotide"
  misc_feature (61)..(61): /note="Nucleotide may be methylated to form 5-methylcytosine"
gcttacccgcatttcatgtccatcctgcaccactgcctccaaatgccttgtaagtgtgttcgtgactcacatgtgtgcttctgaatgtttggacattgtcctaatgggttctggctcctgca

SEQ ID NO: 11076 - DNA, 122 bp, Homo sapiens
  misc_feature (61)..(62): /note="This region represents a CpG dinucleotide"
  misc_feature (61)..(61): /note="Nucleotide may be methylated to form 5-methylcytosine"
gctcctgccttgaccagtcacagagtatcaccctatctcggtatgctgctctgcttgtcgcgtagtaggtctataaatacttgttttatgaatgaatgtatgaacaaagggaagttagtcac

SEQ ID NO: 11077 - DNA, 122 bp, Homo sapiens
  misc_feature (61)..(62): /note="This region represents a CpG dinucleotide"
  misc_feature (61)..(61): /note="Nucleotide may be methylated to form 5-methylcytosine"
tgagccaccacgcccaggcccagagccattcttctgttgcttagaccagaaatcttgattcgtatttctcttacttctgtcaagaaattttgttcagaatgtatttgcaatctacaatctga

SEQ ID NO: 11078 - DNA, 122 bp, Homo sapiens
  misc_feature (61)..(62): /note="This region represents a CpG dinucleotide"
  misc_feature (61)..(61): /note="Nucleotide may be methylated to form 5-methylcytosine"
gtttccagatgcgaagccctgataggctgagtcaaagaaggggaacagaaaccggtgctgcggggaagcaaagtgagtcagggcaggaaatccttctggcaccaacctcagacaccggcctt

SEQ ID NO: 11079 - DNA, 122 bp, Homo sapiens
  misc_feature (61)..(62): /note="This region represents a CpG dinucleotide"
  misc_feature (61)..(61): /note="Nucleotide may be methylated to form 5-methylcytosine"
ttcctgatacagtgccaccctctgatgtggtggctgcccaaaaataacagtaaggctgagcgactgaaagaggcagaggctgcttggctaagataaaaagtactcccaactccactgaaaag

SEQ ID NO: 11080 - DNA, 122 bp, Homo sapiens
  misc_feature (61)..(62): /note="This region represents a CpG dinucleotide"
  misc_feature (61)..(61): /note="Nucleotide may be methylated to form 5-methylcytosine"
gatattattcccatttcacagatgaggaagttgaggcttagagaggataaatgacctgcccgagttaccatagctaataagtagcaaagccagaacttctaaggtgtgcctgagtctaaagc

SEQ ID NO: 11081 - DNA, 122 bp, Homo sapiens
  misc_feature (61)..(62): /note="This region represents a CpG dinucleotide"
  misc_feature (61)..(61): /note="Nucleotide may be methylated to form 5-methylcytosine"
tttccactcaaggactaggaactgaatctctgcacccttaaaaccactctcttagccgggcgcggtggctcatacctgtaatcccagcactttgggaggccaaggcaggtggatcacgaggt

SEQ ID NO: 11082 - DNA, 122 bp, Homo sapiens
  misc_feature (61)..(62): /note="This region represents a CpG dinucleotide"
  misc_feature (61)..(61): /note="Nucleotide may be methylated to form 5-methylcytosine"
tggagagaactcatgtggcccaggaaacatggacaggaatgttcataattgcaaaggcctcggtaacaaaagccagaagtccccaaatatccatgtgccagagaacaaatgcaatgagtttg

SEQ ID NO: 11083 - DNA, 122 bp, Homo sapiens
  misc_feature (61)..(62): /note="This region represents a CpG dinucleotide"
  misc_feature (61)..(61): /note="Nucleotide may be methylated to form 5-methylcytosine"
caccatgaatctacaaggtaggtgactattctctctactctgcaggtgaggaaaccggggcgtggagaggctgtgttacttgctcaaggtcacattactagcaagttccagatcaagatgca

SEQ ID NO: 11084 - DNA, 122 bp, Homo sapiens
  misc_feature (61)..(62): /note="This region represents a CpG dinucleotide"
  misc_feature (61)..(61): /note="Nucleotide may be methylated to form 5-methylcytosine"
ttccaagcaaatgtagcagaagttgtccccctagttctgctcatgtcctggcaaagagtgcggactgagcctgctgactcatggcactctagttcaggtctcccactagaagacaaagcagg

SEQ ID NO: 11085 - DNA, 122 bp, Homo sapiens
  misc_feature (61)..(62): /note="This region represents a CpG dinucleotide"
  misc_feature (61)..(61): /note="Nucleotide may be methylated to form 5-methylcytosine"
atgcttgcatttgacatacatgtgctcatcctgtgctcatcttacttgacctttcggcagcgttagataccactgtatactccctctattttgaaatactttcttcccttgcctttcatgac

SEQ ID NO: 11086 - DNA, 122 bp, Homo sapiens
  misc_feature (61)..(62): /note="This region represents a CpG dinucleotide"
  misc_feature (61)..(61): /note="Nucleotide may be methylated to form 5-methylcytosine"
gagattttttaggaacacatatgtcgcaatacaacagaactgactgtatttcttgcaaatcggcagctgagtccagaggcttagtcagactcatattctttggtagtgtgttctttcaacag

SEQ ID NO: 11087 - DNA, 122 bp, Homo sapiens
  misc_feature (61)..(62): /note="This region represents a CpG dinucleotide"
  misc_feature (61)..(61): /note="Nucleotide may be methylated to form 5-methylcytosine"
agttttcctaaaacataagcacactggttaagccagcaggttaactctgtggctctgacacgcccagtgtgcattcctgaccctgacacatcacacaagctgatgcctccccggacactcct

SEQ ID NO: 11088 - DNA, 122 bp, Homo sapiens
  misc_feature (61)..(62): /note="This region represents a CpG dinucleotide"
  misc_feature (61)..(61): /note="Nucleotide may be methylated to form 5-methylcytosine"
gaacagcaggactagcatggtaaacagactgtaaacaaggagtgtaacctcttgcaaaggcgaggagaggagaccaggaagggaggtgtccagtgaggtgaggaaagcaggtcgagacactc

SEQ ID NO: 11089 - DNA, 122 bp, Homo sapiens
  misc_feature (61)..(62): /note="This region represents a CpG dinucleotide"
  misc_feature (61)..(61): /note="Nucleotide may be methylated to form 5-methylcytosine"
ccattcccttcctggaagtcctgactttaaaacctcgtcagtctgcagtggaagtggcagcgactcccattttgtgaatgcctttggtgtcgggttttgtgtcatttccttccgtgctttgc

SEQ ID NO: 11090 - DNA, 122 bp, Homo sapiens
  misc_feature (61)..(62): /note="This region represents a CpG dinucleotide"
  misc_feature (61)..(61): /note="Nucleotide may be methylated to form 5-methylcytosine"
tctgtctgattctaattcccacatatagccatctggccaagctgactttcaacaatctttcgtatctcttctgttttgattattccccaacacacttcatttccaagtcattctaattataa

SEQ ID NO: 11091 - DNA, 122 bp, Homo sapiens
  misc_feature (61)..(62): /note="This region represents a CpG dinucleotide"
  misc_feature (61)..(61): /note="Nucleotide may be methylated to form 5-methylcytosine"
ctgccacgtccgaggcctctgttccaggcaaggtggggcagggaggggatatagggcagacggcctgttttcaaagacttccaatccagctgggaaggtaagacctgctcccagaagtcaaa

SEQ ID NO: 11092 - DNA, 122 bp, Homo sapiens
  misc_feature (61)..(62): /note="This region represents a CpG dinucleotide"
  misc_feature (61)..(61): /note="Nucleotide may be methylated to form 5-methylcytosine"
acatctctgaaggttatgccggtttacattccttcagcagtccgaccagtccccagcagccgcaccctcgctaaccccagggcaagttacatacagagtggcctgctgtgccaaaggagcta

SEQ ID NO: 11093 - DNA, 122 bp, Homo sapiens
  misc_feature (61)..(62): /note="This region represents a CpG dinucleotide"
  misc_feature (61)..(61): /note="Nucleotide may be methylated to form 5-methylcytosine"
gctgtgaggggtggagccagccacctgccccacctcacccgtaccctcgctacctcatgccggaggctgcacaggtatctgggacatccagccccatgtattacacccttacctctgacctg

SEQ ID NO: 11094 - DNA, 122 bp, Homo sapiens
  misc_feature (61)..(62): /note="This region represents a CpG dinucleotide"
  misc_feature (61)..(61): /note="Nucleotide may be methylated to form 5-methylcytosine"
cctaagattacacagcttagtaagtggcagaaccacagctggaagccaggtccttcctcacgcaagtcctggctcattcattcctcttccaaagacttgctgagcaccttctaggtgccaga

SEQ ID NO: 11095 - DNA, 122 bp, Homo sapiens
  misc_feature (61)..(62): /note="This region represents a CpG dinucleotide"
  misc_feature (61)..(61): /note="Nucleotide may be methylated to form 5-methylcytosine"
agatcattgacattcatttctgaagcaacatcacatttacaggttcacagaatttcagaacgagtggctgtaaggaatgatagagatcatcacgtattcagtccaatgccctcgtttttcac

SEQ ID NO: 11096 - DNA, 122 bp, Homo sapiens
  misc_feature (61)..(62): /note="This region represents a CpG dinucleotide"
  misc_feature (61)..(61): /note="Nucleotide may be methylated to form 5-methylcytosine"
cagggaaaaaagaaacaatcagggaaatacttaaatcatgatacagccactggagaactacgcagtctttgatgtcgcaacagagaaatgttatttgaaaaaggaggatacaggccaggcgt

SEQ ID NO: 11097 - DNA, 122 bp, Homo sapiens
  misc_feature (61)..(62): /note="This region represents a CpG dinucleotide"
  misc_feature (61)..(61): /note="Nucleotide may be methylated to form 5-methylcytosine"
gtactgataaatcacctggctaataaatagacaacacaatcacctagatgacttagaatacgtgaatacatacagacagaggttggttgattccttggagtgttcttatgacagtgctgatt

SEQ ID NO: 11098 - DNA, 122 bp, Homo sapiens
  misc_feature (61)..(62): /note="This region represents a CpG dinucleotide"
  misc_feature (61)..(61): /note="Nucleotide may be methylated to form 5-methylcytosine"
tactacctaatagagctgtttcatctgtcaagaatgtgcctcctcctgatatctgcatttcgtcttagcgtatttgtttctttttagcattgtcaaggaatgactcaaagatacttagttgg

SEQ ID NO: 11099 - DNA, 122 bp, Homo sapiens
  misc_feature (61)..(62): /note="This region represents a CpG dinucleotide"
  misc_feature (61)..(61): /note="Nucleotide may be methylated to form 5-methylcytosine"
tctcgtttcagaggtgaggacacgcctatggtgctgtgtctgtgtccagcaggttctgctcggccccgacagtgctgcccgccaggtgcccttcccgcacgcttgctgcagtcagccctgca

SEQ ID NO: 11100 - DNA, 122 bp, Homo sapiens
  misc_feature (61)..(62): /note="This region represents a CpG dinucleotide"
  misc_feature (61)..(61): /note="Nucleotide may be methylated to form 5-methylcytosine"
gtaacatgttcctgcaagaagattgacttcatcctagcattttctcctttgggtgaaacacgcaggaacaagccaaggagtgcggtctcattagttggatttccatcctaagggataagagt

SEQ ID NO: 11101 - DNA, 122 bp, Homo sapiens
  misc_feature (61)..(62): /note="This region represents a CpG dinucleotide"
  misc_feature (61)..(61): /note="Nucleotide may be methylated to form 5-methylcytosine"
ttacttgctaactcctctacctagggcaagttacttaaacatcgcaagtctcagtttcttcgctgagaaagtggggagagtaacagtgcctactttgtaggattactgtgaagattaaacta

SEQ ID NO: 11102 - DNA, 122 bp, Homo sapiens
  misc_feature (61)..(62): /note="This region represents a CpG dinucleotide"
  misc_feature (61)..(61): /note="Nucleotide may be methylated to form 5-methylcytosine"
atgggggcttcaaatatcagcccccagtcagaagctgcaaccccagtgctctgctcagagcggctgtgatccagctccgacacccacggggtgaagtcatggggattaactgacttaactgt

SEQ ID NO: 11103 - DNA, 122 bp, Homo sapiens
  misc_feature (61)..(62): /note="This region represents a CpG dinucleotide"
  misc_feature (61)..(61): /note="Nucleotide may be methylated to form 5-methylcytosine"
acaccatgcatttatttaggccacactaatctcttaacccagtgaagcacaaactacattcgcattcaaattggagcctcactggtttcaaagggcccatcattacttcattctgaagcaat

SEQ ID NO: 11104 - DNA, 122 bp, Homo sapiens
  misc_feature (61)..(62): /note="This region represents a CpG dinucleotide"
  misc_feature (61)..(61): /note="Nucleotide may be methylated to form 5-methylcytosine"
agtcagagatgggggcttgcagatttaattggaaatagttcttgaaattgagtgagtgtacgtacatgcatgtgtgagcgtctattgactgttatgtccttcaagcatgaattaattagcac

SEQ ID NO: 11105 - DNA, 122 bp, Homo sapiens
  misc_feature (61)..(62): /note="This region represents a CpG dinucleotide"
  misc_feature (61)..(61): /note="Nucleotide may be methylated to form 5-methylcytosine"
ggtagtggaactgctgacgcagatggtttcttaaattttattttgtcaaattaagtacaacgaagagctaaacggtttttggaaatagatatcatgacttgaatcaggagatggcagaagcc

SEQ ID NO: 11106 - DNA, 122 bp, Homo sapiens
  misc_feature (61)..(62): /note="This region represents a CpG dinucleotide"
  misc_feature (61)..(61): /note="Nucleotide may be methylated to form 5-methylcytosine"
agttcagcgtgtatccatcctgactcctccaataaatgcagaaacttgtatgtctctccccgacaactggattatcatatacattattcaagcataggctttagactcagacatatctacat

SEQ ID NO: 11107 - DNA, 122 bp, Homo sapiens
  misc_feature (61)..(62): /note="This region represents a CpG dinucleotide"
  misc_feature (61)..(61): /note="Nucleotide may be methylated to form 5-methylcytosine"
cccattttcgagatgagatcatctggcttagagggattacgtgatttatgcacagggacacgtggatggccaaatggtagagtcaggaattaaatccagatttctctgatctcaaaccatga

SEQ ID NO: 11108 - DNA, 122 bp, Homo sapiens
  misc_feature (61)..(62): /note="This region represents a CpG dinucleotide"
  misc_feature (61)..(61): /note="Nucleotide may be methylated to form 5-methylcytosine"
ctgggggtctctcatgagggaccttctgaagtattttgctgggtgtctgctagctgggcacggctactgtgtgtctgctgagcttccaccgctgacccacttctatttccttcctcctgaga

SEQ ID NO: 11109 - DNA, 122 bp, Homo sapiens
  misc_feature (61)..(62): /note="This region represents a CpG dinucleotide"
  misc_feature (61)..(61): /note="Nucleotide may be methylated to form 5-methylcytosine"
atttcaaaatatattttttgagaagttctaagttaaacagctcttaaaatgtattatgtacgtggttgtggagggaagggagatgtttcattatgagatcccaggcaaatggcaatatgttt

SEQ ID NO: 11110 - DNA, 122 bp, Homo sapiens
  misc_feature (61)..(62): /note="This region represents a CpG dinucleotide"
  misc_feature (61)..(61): /note="Nucleotide may be methylated to form 5-methylcytosine"
ctgctgcagacacatgggaatgggaccctgcccacaggtggtgcctcatggaagagtcatcgtgggccaaacagtagagcccgtgactcatcagaggcaatatccaagatggggcagccaag

SEQ ID NO: 11111 - DNA, 122 bp, Homo sapiens
  misc_feature (61)..(62): /note="This region represents a CpG dinucleotide"
  misc_feature (61)..(61): /note="Nucleotide may be methylated to form 5-methylcytosine"
caggatggacagtagatgcacttggcttgggaactcaaacaccagaattctgtgactgagcgataacctggaggaggaatagctaagaaataagtaaaaggtgagtcaccctgttgtacaac

SEQ ID NO: 11112 - DNA, 122 bp, Homo sapiens
  misc_feature (61)..(62): /note="This region represents a CpG dinucleotide"
  misc_feature (61)..(61): /note="Nucleotide may be methylated to form 5-methylcytosine"
ctcaggtgattcacccaccttggcctctcaaagtgctgggattacaggcatgagccaccacgcctggacaagagtttttaaaaaatcaacatcccgtggccaggtgtggtaactcatgcctg

SEQ ID NO: 11113 - DNA, 122 bp, Homo sapiens
  misc_feature (61)..(62): /note="This region represents a CpG dinucleotide"
  misc_feature (61)..(61): /note="Nucleotide may be methylated to form 5-methylcytosine"
catactttgggggccagtagaatttgctgcgggagagctcactctagaaggggttctcaacgtctggcttccagacgagcagcaacagcattcactgggaacttgcataagtggaaattagg

SEQ ID NO: 11114 - DNA, 122 bp, Homo sapiens
  misc_feature (61)..(62): /note="This region represents a CpG dinucleotide"
  misc_feature (61)..(61): /note="Nucleotide may be methylated to form 5-methylcytosine"
ccatagtcacatataaaatgacaaatgtcacagtaatgtcaaattatgccttgtcacatacgtacaggagacaactgtcacaatcatgtgaaatcacagtgcaggagcaggatggaacagag

SEQ ID NO: 11115 - DNA, 122 bp, Homo sapiens
  misc_feature (61)..(62): /note="This region represents a CpG dinucleotide"
  misc_feature (61)..(61): /note="Nucleotide may be methylated to form 5-methylcytosine"
ttgtgaatgactctctcagggagcatgtgcaggagaagccagagcctcactccatgggaacgtaacagacagagctaaagaatgggctaagaacagccgctgaatggaacaggtcatgctgc

SEQ ID NO: 11116 - DNA, 122 bp, Homo sapiens
  misc_feature (61)..(62): /note="This region represents a CpG dinucleotide"
  misc_feature (61)..(61): /note="Nucleotide may be methylated to form 5-methylcytosine"
gagaatatgttagtggctgccaggaaaacttgtcatcattttagtcattcggtcaaggcccgtcagatactgcaagagttccaaaatgatcaccaacttccatggaagaatttgaagcagga

SEQ ID NO: 11117 - DNA, 122 bp, Homo sapiens
  misc_feature (61)..(62): /note="This region represents a CpG dinucleotide"
  misc_feature (61)..(61): /note="Nucleotide may be methylated to form 5-methylcytosine"
tgggaggtcacaacacatagagaccagcttttctatcactgcatattaaactcttgattgcgttccccagcagcagcctaagtgatgctaatagagttcccagtttataattaagtaggcaa

SEQ ID NO: 11118 - DNA, 122 bp, Homo sapiens
  misc_feature (61)..(62): /note="This region represents a CpG dinucleotide"
  misc_feature (61)..(61): /note="Nucleotide may be methylated to form 5-methylcytosine"
cccacaggtattttagggaattaggaaatgtaaatagggagaggctgggagccataagagcgtcgagtccctatgctcagtctgactcatgtttattgagagcctggcctgtgtaaggcagt

SEQ ID NO: 11119 - DNA, 122 bp, Homo sapiens
  misc_feature (61)..(62): /note="This region represents a CpG dinucleotide"
  misc_feature (61)..(61): /note="Nucleotide may be methylated to form 5-methylcytosine"
caggtgtccctgggatgagtcatgccctttccaaagattaagcactgaggccacccttgacgtcatggcaaccgagccacaaccactttattcctaggccaagtttgcacctctgcacacta

SEQ ID NO: 11120 - DNA, 122 bp, Homo sapiens
  misc_feature (61)..(62): /note="This region represents a CpG dinucleotide"
  misc_feature (61)..(61): /note="Nucleotide may be methylated to form 5-methylcytosine"
atccgcctgcctcggcctgccaaagtgctgggattgcaaagtgtgagccaccacaatcagcgcgatttcagagattattaagggcaggggaaggaatcccttctaagagaagtttggaggaa

SEQ ID NO: 11121 - DNA, 122 bp, Homo sapiens
  misc_feature (61)..(62): /note="This region represents a CpG dinucleotide"
  misc_feature (61)..(61): /note="Nucleotide may be methylated to form 5-methylcytosine"
gagcatctctctgtgtcagacactgggctccatcccaggatttaaaactaaatagctgggcgtggtggctcatgcctgtaatcccagcactttgggaggccaaagtgggtggatcacctgag

SEQ ID NO: 11122 - DNA, 122 bp, Homo sapiens
  misc_feature (61)..(62): /note="This region represents a CpG dinucleotide"
  misc_feature (61)..(61): /note="Nucleotide may be methylated to form 5-methylcytosine"
ttagctgtgtgatcttgggcaagttatttaactcctctgagccttgctttactcaccctacggtgaagacaggaagagtaattactaaataatgttggttgagtattaaatgagacaatgca

SEQ ID NO: 11123 - DNA, 122 bp, Homo sapiens
  misc_feature (61)..(62): /note="This region represents a CpG dinucleotide"
  misc_feature (61)..(61): /note="Nucleotide may be methylated to form 5-methylcytosine"
caaactccgacctcggtttcgcccttgcaactcccagctttcctatatgtccaagggcggcgagggctcaaaagtcctggataatccgcagatagaacacacacacccttttccgaattctg

SEQ ID NO: 11124 - DNA, 122 bp, Homo sapiens
  misc_feature (61)..(62): /note="This region represents a CpG dinucleotide"
  misc_feature (61)..(61): /note="Nucleotide may be methylated to form 5-methylcytosine"
tttacacaccagcatgatgaggaagaagtaagaatgcagatgagaaagagtgggcaatgtcgaaagaggaaaaccacaagagcgttgtcttgaagtcaaaatgaagaaagtatttcaaaaaa

SEQ ID NO: 11125 - DNA, 122 bp, Homo sapiens
  misc_feature (61)..(62): /note="This region represents a CpG dinucleotide"
  misc_feature (61)..(61): /note="Nucleotide may be methylated to form 5-methylcytosine"
aactctgctcatcatcacacacacacacaacctctcagcctggctgctttctaaggagatcgctgccagaatgcttcttatacaagttaccaacacgtgcatggttaagaaagaaatttgac

SEQ ID NO: 11126 - DNA, 122 bp, Homo sapiens
  misc_feature (61)..(62): /note="This region represents a CpG dinucleotide"
  misc_feature (61)..(61): /note="Nucleotide may be methylated to form 5-methylcytosine"
ctaattagtcaccaagtccttagaatttatcctgctctactgcatgtttcttcctcaaaccgtccttcacctctgtactgcagcccctttagaaattagcttgagaggccagatgtggtggc

SEQ ID NO: 11127 - DNA, 122 bp, Homo sapiens
  misc_feature (61)..(62): /note="This region represents a CpG dinucleotide"
  misc_feature (61)..(61): /note="Nucleotide may be methylated to form 5-methylcytosine"
taactcaccatcagaaaccctacactcaggctagacttgttctgtggcttaaaactgcagcgtctcagccgggtggagtggctcatacctataatcccagcactttgagaggccgaggcagg

SEQ ID NO: 11128 - DNA, 122 bp, Homo sapiens
  misc_feature (61)..(62): /note="This region represents a CpG dinucleotide"
  misc_feature (61)..(61): /note="Nucleotide may be methylated to form 5-methylcytosine"
acacagctgtgtcaggagatgttggcccctacaggatatgaggctcctaagccaaggcatcgcctgtacctgccccaggcgaatcttgtctccttgcacctgagctgtgctgtgtgaactgc

SEQ ID NO: 11129 - DNA, 122 bp, Homo sapiens
  misc_feature (61)..(62): /note="This region represents a CpG dinucleotide"
  misc_feature (61)..(61): /note="Nucleotide may be methylated to form 5-methylcytosine"
aagtaagggtttaaaagaggtgattaagttaaaatgaggtcatcagggtgcaccccagtccgacatagctgatgtccttataagaagaggaaattaggacacagacatatgccatgtgaaga

SEQ ID NO: 11130 - DNA, 122 bp, Homo sapiens
  misc_feature (61)..(62): /note="This region represents a CpG dinucleotide"
  misc_feature (61)..(61): /note="Nucleotide may be methylated to form 5-methylcytosine"
gctttggctgagtgtaagaatctctgtgagtgttctatttaaaacactgaatcatgttcacgcaaagcctgactcagtccttggtggaagtgtttcagggttgttcagtaaacccacaccct

SEQ ID NO: 11131 - DNA, 122 bp, Homo sapiens
  misc_feature (61)..(62): /note="This region represents a CpG dinucleotide"
  misc_feature (61)..(61): /note="Nucleotide may be methylated to form 5-methylcytosine"
gcctgaagacatgataatgccaaatggccacatctgtttcatagacattcatctgtgccacgcaacaacataccccaggctttacaaacaagaccccatcaaagtcttgtataagccaggca

SEQ ID NO: 11132 - DNA, 122 bp, Homo sapiens
  misc_feature (61)..(62): /note="This region represents a CpG dinucleotide"
  misc_feature (61)..(61): /note="Nucleotide may be methylated to form 5-methylcytosine"
tcagaaataacgcagcagctgctggggtggagccttatcagccctggtgccaaggaactgcgctcggagaaccacggaaccaagctggcaggccaagaacactcctcacaccatccatccct

SEQ ID NO: 11133 - DNA, 122 bp, Homo sapiens
  misc_feature (61)..(62): /note="This region represents a CpG dinucleotide"
  misc_feature (61)..(61): /note="Nucleotide may be methylated to form 5-methylcytosine"
taaatgaatgactcaatgatgaccagagggatggtattttaccaaatgctggttttgtcccgctttgtgggctgcagggggtctatgtgccagggctaaaatacttagtcactaccccaaat

SEQ ID NO: 11134 - DNA, 122 bp, Homo sapiens
  misc_feature (61)..(62): /note="This region represents a CpG dinucleotide"
  misc_feature (61)..(61): /note="Nucleotide may be methylated to form 5-methylcytosine"
cttaccacatagagagaaaacccaaaagtaagctgcctgtgaatgctcatcacgtccaggcgctcttgcaaacatccgtcttcgtgcagacccctgccctgtgaagtgctgaatcccccaca

SEQ ID NO: 11135 - DNA, 122 bp, Homo sapiens
  misc_feature (61)..(62): /note="This region represents a CpG dinucleotide"
  misc_feature (61)..(61): /note="Nucleotide may be methylated to form 5-methylcytosine"
caggcagcagaccagatttggactcataggctttcattcgtggacctcttctgtgatacccgtgtgatttcattctgctctacaaagtggtggatctcctaaaaagtggttcccttacagcg

SEQ ID NO: 11136 - DNA, 122 bp, Homo sapiens
  misc_feature (61)..(62): /note="This region represents a CpG dinucleotide"
  misc_feature (61)..(61): /note="Nucleotide may be methylated to form 5-methylcytosine"
tttgtcttactagttaaatcctcacctaatctcttgggtatgaatataaatgtgtgtcatcgttatattgttcagctagatgagcaagtatcttagggtagtaggtagcctggtggttttag

SEQ ID NO: 11137 - DNA, 122 bp, Homo sapiens
  misc_feature (61)..(62): /note="This region represents a CpG dinucleotide"
  misc_feature (61)..(61): /note="Nucleotide may be methylated to form 5-methylcytosine"
gaggtctgtcatcagagaggtgtgctttttaaagcaaataatcacggcttgatgcgttcacgctgcccctgctgtgttaaatgaaagcttgaaaattgccagagtgttggtgttttgcagca

SEQ ID NO: 11138 - DNA, 122 bp, Homo sapiens
  misc_feature (61)..(62): /note="This region represents a CpG dinucleotide"
  misc_feature (61)..(61): /note="Nucleotide may be methylated to form 5-methylcytosine"
ccattagcaatctgtagagaacttaatgaacctgaacccaggcttctctagctctggtaacgtgtgattgttttcactacaatatgatacatagatggtaccttacttttcctcattcttaa

SEQ ID NO: 11139 - DNA, 122 bp, Homo sapiens
  misc_feature (61)..(62): /note="This region represents a CpG dinucleotide"
  misc_feature (61)..(61): /note="Nucleotide may be methylated to form 5-methylcytosine"
tccatgtcacccacatcacatcctgtcagcaactgtctattttaccttgcatggagtgggcgctgtcttcctggatctcagctcaccagcctgccctgccaagcaaacctgcaggagcctga

SEQ ID NO: 11140 - DNA, 122 bp, Homo sapiens
  misc_feature (61)..(62): /note="This region represents a CpG dinucleotide"
  misc_feature (61)..(61): /note="Nucleotide may be methylated to form 5-methylcytosine"
attctccgtgtgaagcccttccaggtgtttcaagctcttggtttataggactgtgaatgtcgtcatcttaatacagcccttcccatcactttgatccctgatggaaaaattagctctcatct

SEQ ID NO: 11141 - DNA, 122 bp, Homo sapiens
  misc_feature (61)..(62): /note="This region represents a CpG dinucleotide"
  misc_feature (61)..(61): /note="Nucleotide may be methylated to form 5-methylcytosine"
acatatattcttgccctttaatccagcttctagcaagttatctaagtgattcatcagatacgtgcaaagactagtattcatcacagcactgttcacaaaagtaaaactctgggaacagccta

SEQ ID NO: 11142 - DNA, 122 bp, Homo sapiens
  misc_feature (61)..(62): /note="This region represents a CpG dinucleotide"
  misc_feature (61)..(61): /note="Nucleotide may be methylated to form 5-methylcytosine"
ggggtgagttttaccttgagctctccgtctataccctgtgagctctccaaattccagctgcggcttgatctatgtctctgattagtggatgtcatggtttatgatctgctgagccacatcta

SEQ ID NO: 11143 - DNA, 122 bp, Homo sapiens
  misc_feature (61)..(62): /note="This region represents a CpG dinucleotide"
  misc_feature (61)..(61): /note="Nucleotide may be methylated to form 5-methylcytosine"
aatcacatacttctattaacagagttatccaagtgggctgaatcatgcttgtgagtcccacgtgtggtacccagaacagaagagaagaatcacacctgtgcactgggccacatttcacttag

SEQ ID NO: 11144 - DNA, 122 bp, Homo sapiens
  misc_feature (61)..(62): /note="This region represents a CpG dinucleotide"
  misc_feature (61)..(61): /note="Nucleotide may be methylated to form 5-methylcytosine"
tggcctgtgccggcctctccagcctcatgggtccccagcacggctcctccaccccacacacgagaactccaggctccactcacaccagggaatacgcgaggtggcgagtcacagggttgctg

SEQ ID NO: 11145 - DNA, 122 bp, Homo sapiens
  misc_feature (61)..(62): /note="This region represents a CpG dinucleotide"
  misc_feature (61)..(61): /note="Nucleotide may be methylated to form 5-methylcytosine"
gtacaaccagtaacatgcaggagctggcttgcaccagcttgcaagagctgattgggcatacgtactgcttcctaactccattttcagtaacagcttgaaatcagccactgtggaagtattta

SEQ ID NO: 11146 - DNA, 122 bp, Homo sapiens
  misc_feature (61)..(62): /note="This region represents a CpG dinucleotide"
  misc_feature (61)..(61): /note="Nucleotide may be methylated to form 5-methylcytosine"
agcagttgaggctactgttgctcaacacattttgctttcacttcagtccatcagtcttttcgcaatgtgaagatcacccacatggaagtgtcctgggatatgtcaggcacctctttacttcc

SEQ ID NO: 11147 - DNA, 122 bp, Homo sapiens
  misc_feature (61)..(62): /note="This region represents a CpG dinucleotide"
  misc_feature (61)..(61): /note="Nucleotide may be methylated to form 5-methylcytosine"
ctgctgtctctgcatgtggctttcaacctcaaggttgcctcatggttctaagagggctgccgcacctctagttcaaaagtctacatccaagacaagaggaagaaggaagtacggagagtgta

SEQ ID NO: 11148 - DNA, 122 bp, Homo sapiens
  misc_feature (61)..(62): /note="This region represents a CpG dinucleotide"
  misc_feature (61)..(61): /note="Nucleotide may be methylated to form 5-methylcytosine"
ggcccatgcatctagtgctgctgtcctggacagagcggctctaagtgatctgcttttacacgctttatggtccgactatacataatcctcccattagtaactaaagtattggccaataaatt

SEQ ID NO: 11149 - DNA, 122 bp, Homo sapiens
  misc_feature (61)..(62): /note="This region represents a CpG dinucleotide"
  misc_feature (61)..(61): /note="Nucleotide may be methylated to form 5-methylcytosine"
attgacagagtgttcttaaaatatggccactgaatcacatccgacttttctttctgcagacgccgaaccagtcagggtacatttctctgttaataacatctcctttcagaaggcatctactc

SEQ ID NO: 11150 - DNA, 122 bp, Homo sapiens
  misc_feature (61)..(62): /note="This region represents a CpG dinucleotide"
  misc_feature (61)..(61): /note="Nucleotide may be methylated to form 5-methylcytosine"
ggctgaggctttccccttgcagatcctctcagccatggcagaaagggtggagagggcaagcggaggactgggcagagctgcacggacacctggagttcttgtctggccacttcccatgttag

SEQ ID NO: 11151 - DNA, 122 bp, Homo sapiens
  misc_feature (61)..(62): /note="This region represents a CpG dinucleotide"
  misc_feature (61)..(61): /note="Nucleotide may be methylated to form 5-methylcytosine"
aatttttaaaaatgaactgctgatacacacagtaacctggatgacgccctcaggtggctacgctgcatgaaaaccataatcctgggctacatactgtgtcattccatttgtataacattctt

SEQ ID NO: 11152 - DNA, 122 bp, Homo sapiens
  misc_feature (61)..(62): /note="This region represents a CpG dinucleotide"
  misc_feature (61)..(61): /note="Nucleotide may be methylated to form 5-methylcytosine"
aagctttttaccttaagcctttgttttgatctcattttctcttctctgagaataaagtaacgctcaaagtagtattggcaaaacagagtgctgaactgattgtcagtaccctgttttcccag

SEQ ID NO: 11153 - DNA, 122 bp, Homo sapiens
  misc_feature (61)..(62): /note="This region represents a CpG dinucleotide"
  misc_feature (61)..(61): /note="Nucleotide may be methylated to form 5-methylcytosine"
gccctgggctcccttcagctgcctgggccctaccctggagactgactcagtgaattgagccgcagtcttggtatctggaaggctaacaggtcttcccagctgattgtgctgcaggtgttgga

SEQ ID NO: 11154 - DNA, 122 bp, Homo sapiens
  misc_feature (61)..(62): /note="This region represents a CpG dinucleotide"
  misc_feature (61)..(61): /note="Nucleotide may be methylated to form 5-methylcytosine"
ttctcacaatgtatagcctatgatgtttcaatacaaacagctggactgagacccatacaacgcatatgcacagtcttcatttcacaataagcttctcctcccagaaagctcttcagttggtt

SEQ ID NO: 11155 - DNA, 122 bp, Homo sapiens
  misc_feature (61)..(62): /note="This region represents a CpG dinucleotide"
  misc_feature (61)..(61): /note="Nucleotide may be methylated to form 5-methylcytosine"
tgagggtagggcagggcagggcaggcctaggcctctgcatcctactcccggcctgccagccgggacaaaccaggcaaagaggcccctctaggcacccgaggcagcccccatgggagggggtg

SEQ ID NO: 11156 - DNA, 122 bp, Homo sapiens
  misc_feature (61)..(62): /note="This region represents a CpG dinucleotide"
  misc_feature (61)..(61): /note="Nucleotide may be methylated to form 5-methylcytosine"
taagaacatcagtgttaccgtccttagtatcaaataaatgcaggcaaaagcacaagactacggagttttatttagcctgaacagcctagtagtgttggatttaggaggtgtttaatgctgac

SEQ ID NO: 11157 - DNA, 122 bp, Homo sapiens
  misc_feature (61)..(62): /note="This region represents a CpG dinucleotide"
  misc_feature (61)..(61): /note="Nucleotide may be methylated to form 5-methylcytosine"
atctactctggatgaggctctgtgctgggcttgaggggtacagggaagtttcacatgtcccgtcttgttgaatcacacacacttgatctcactacaacagcagaaaacaagttaaagttccc

SEQ ID NO: 11158 - DNA, 122 bp, Homo sapiens
  misc_feature (61)..(62): /note="This region represents a CpG dinucleotide"
  misc_feature (61)..(61): /note="Nucleotide may be methylated to form 5-methylcytosine"
acatgttgggcaggggacttgatacttgagtggtgaggaaccatcaaagactttcaaacacgactaacaggttggacgtgagtgactcagtgattcactgttttttgttgctctcaatctgt

SEQ ID NO: 11159 - DNA, 122 bp, Homo sapiens
  misc_feature (61)..(62): /note="This region represents a CpG dinucleotide"
  misc_feature (61)..(61): /note="Nucleotide may be methylated to form 5-methylcytosine"
ctgttgtatggggtaaagtgggtggggtttgtgttgatgaagtcacagacctatcttcaccgcaaaccttcccagggttcatcccatagctaagaccaaagtgatgcatgtctacccagggg

SEQ ID NO: 11160 - DNA, 122 bp, Homo sapiens
  misc_feature (61)..(62): /note="This region represents a CpG dinucleotide"
  misc_feature (61)..(61): /note="Nucleotide may be methylated to form 5-methylcytosine"
ctgtggctagtgtggcacaaggaagaggaaggatgggagattacgtgctagtgtgatgtgcggttgtcttcctgtgggtgttcccccagccacatacatagaactgggagctcctggtgcac

SEQ ID NO: 11161 - DNA, 122 bp, Homo sapiens
  misc_feature (61)..(62): /note="This region represents a CpG dinucleotide"
  misc_feature (61)..(61): /note="Nucleotide may be methylated to form 5-methylcytosine"
tagaccctgataacctgcaattccacagccaggtttctatcccagagaaacaaaatcacacgtgcacaagagagcgtatgaaagttcacagcagcattgtctgtcttggtgaaagcctgggt

SEQ ID NO: 11162 - DNA, 122 bp, Homo sapiens
  misc_feature (61)..(62): /note="This region represents a CpG dinucleotide"
  misc_feature (61)..(61): /note="Nucleotide may be methylated to form 5-methylcytosine"
tacttcagctattccttagatgagcaatttgttgaatgtgattatggttttgaggactctcgccactcttttgggtgtgttccagtttgtcagtgtcatctttaatgtggcatctggagctg

SEQ ID NO: 11163 - DNA, 122 bp, Homo sapiens
  misc_feature (61)..(62): /note="This region represents a CpG dinucleotide"
  misc_feature (61)..(61): /note="Nucleotide may be methylated to form 5-methylcytosine"
tcatctgaaatgaccaatgatgcgggaagtaccctttccagatgctggctcagccagggccgagtgacctgttgcagagtccatgagaaaacatgtttgatggcagggttattcttccagga

SEQ ID NO: 11164 - DNA, 122 bp, Homo sapiens
  misc_feature (61)..(62): /note="This region represents a CpG dinucleotide"
  misc_feature (61)..(61): /note="Nucleotide may be methylated to form 5-methylcytosine"
ggacaggtgggaaagggccgggtgtctggtcctgctgccaggggacagtgcaggtgtgaccgtccgggcagagatgagtcaccctccacactgtcttgctgcccgtctccacgcctagtttt

SEQ ID NO: 11165 - DNA, 122 bp, Homo sapiens
  misc_feature (61)..(62): /note="This region represents a CpG dinucleotide"
  misc_feature (61)..(61): /note="Nucleotide may be methylated to form 5-methylcytosine"
catagcaggaaggggaatattttcaatctgtttccttctacatggctgtaagaaacatgacgcccatccatcatgcaaagagagcctgacgaggcagaggaaagatcatggcaggacttctg

SEQ ID NO: 11166 - DNA, 122 bp, Homo sapiens
  misc_feature (61)..(62): /note="This region represents a CpG dinucleotide"
  misc_feature (61)..(61): /note="Nucleotide may be methylated to form 5-methylcytosine"
aacatttgaagggatctgtcagttactggtgggacagatcactgatgggtcaagcttgcacgtcatcaaatacagcacatcctgactcacaaaattcccccgacatcatctgggagcacact

SEQ ID NO: 11167 - DNA, 122 bp, Homo sapiens
  misc_feature (61)..(62): /note="This region represents a CpG dinucleotide"
  misc_feature (61)..(61): /note="Nucleotide may be methylated to form 5-methylcytosine"
cagttctgggaatggtgggaaccctcctgaaatccaagttcccagatgccagccaagggccggctttgtaagcaggcctttccaaggataagcagttagggctgctacctcaactttttgtt

SEQ ID NO: 11168 - DNA, 122 bp, Homo sapiens
  misc_feature (61)..(62): /note="This region represents a CpG dinucleotide"
  misc_feature (61)..(61): /note="Nucleotide may be methylated to form 5-methylcytosine"
tgacggtcctaacccacaagcccagccctgcaggaaagggaatcaacctcatcctcctaccgcacaccgttgccccatcctgccagggtggcggcggcagaaactccatcttccctccccag

SEQ ID NO: 11169 - DNA, 122 bp, Homo sapiens
  misc_feature (61)..(62): /note="This region represents a CpG dinucleotide"
  misc_feature (61)..(61): /note="Nucleotide may be methylated to form 5-methylcytosine"
ttacttaaagaaagagtcttgcagcataggctgtgagcccaaactatgagctattcaaagcgcagactgtgagctacatattcaaacatgacagagttacgttttaaaaaaacaaaggcaga

SEQ ID NO: 11170 - DNA, 122 bp, Homo sapiens
  misc_feature (61)..(62): /note="This region represents a CpG dinucleotide"
  misc_feature (61)..(61): /note="Nucleotide may be methylated to form 5-methylcytosine"
tggagcaagggttcgattggcggagctcaggtaacatgtccacactttagctaaggagggcgggcaacttgatggacagctccaccaagactgcacagaagtgcagagttccagatccctct

SEQ ID NO: 11171 - DNA, 122 bp, Homo sapiens
  misc_feature (61)..(62): /note="This region represents a CpG dinucleotide"
  misc_feature (61)..(61): /note="Nucleotide may be methylated to form 5-methylcytosine"
cttttaatttgactccattcttaggatgatgtgctgcatttctgcaatggcacccactggcgtgcaaaagaaaaactggattttccaggttaagcagaaacatggacgccatactaaactct

SEQ ID NO: 11172 - DNA, 122 bp, Homo sapiens
  misc_feature (61)..(62): /note="This region represents a CpG dinucleotide"
  misc_feature (61)..(61): /note="Nucleotide may be methylated to form 5-methylcytosine"
cattatgtgcacaaagatacatcagtgtgtgcagctacaaagtgcaggtcacagctcgcccgcacaggagcaagagtcctcgtcgtttttaatctggaaatgcactctgcttctgtgacggg

SEQ ID NO: 11173 - DNA, 122 bp, Homo sapiens
  misc_feature (61)..(62): /note="This region represents a CpG dinucleotide"
  misc_feature (61)..(61): /note="Nucleotide may be methylated to form 5-methylcytosine"
tgaaacatgtataaagaagagagaatggcgtgcacgccccgtgtctctctcaggagtgtgcgagttttcgtgtgcagcctgtttcatccctgcaccgcacaggagggacacacagtgccatc

SEQ ID NO: 11174 - DNA, 122 bp, Homo sapiens
  misc_feature (61)..(62): /note="This region represents a CpG dinucleotide"
  misc_feature (61)..(61): /note="Nucleotide may be methylated to form 5-methylcytosine"
cctctgctgtccatgctaagcacaggttcaaccagcttcataggcactgaacatcctctgcgtcatgcttttcattcctgacacacagttcaaggaaaaacaaacccaaagtggcttttcct

SEQ ID NO: 11175 - DNA, 122 bp, Homo sapiens
  misc_feature (61)..(62): /note="This region represents a CpG dinucleotide"
  misc_feature (61)..(61): /note="Nucleotide may be methylated to form 5-methylcytosine"
cgtgcactgactatccacaggtggaccttctctatgccctgagcagcaccagccctgtgacggtgacttcatgtctgtctagagaggtccttagagtcagcaccttgagtcatccaggggtg

SEQ ID NO: 11176 - DNA, 122 bp, Homo sapiens
  misc_feature (61)..(62): /note="This region represents a CpG dinucleotide"
  misc_feature (61)..(61): /note="Nucleotide may be methylated to form 5-methylcytosine"
cggatattcaatttctctcaggcctagagctaacgtcatgtgtctggctgctaaaagctccggctccttttattaccacagtaaaggaagataacaggcgagaggtctgctgtagacattta

SEQ ID NO: 11177 - DNA, 122 bp, Homo sapiens
  misc_feature (61)..(62): /note="This region represents a CpG dinucleotide"
  misc_feature (61)..(61): /note="Nucleotide may be methylated to form 5-methylcytosine"
aagaagcagaagctgttaggacacaaaacacacctgaacagtctcactggtgtgagtaaacgcaatcacctgggagacgcaggcatcatcacacccaattgtgtaattatagccacacattg

SEQ ID NO: 11178 - DNA, 122 bp, Homo sapiens
  misc_feature (61)..(62): /note="This region represents a CpG dinucleotide"
  misc_feature (61)..(61): /note="Nucleotide may be methylated to form 5-methylcytosine"
cccaacagggacatgtccgtcacggtggtgtgttacatcatgtcagatggcaattgaatgcgctgttaacataagctgacaggaaggctctagcaatctgcttatctggatgccacccttgc

SEQ ID NO: 11179 - DNA, 122 bp, Homo sapiens
  misc_feature (61)..(62): /note="This region represents a CpG dinucleotide"
  misc_feature (61)..(61): /note="Nucleotide may be methylated to form 5-methylcytosine"
gcctgggagccacacagaacatgtctattcatgctgttgtggagtgtgtcacccagctggcgtggcacctcacacactcaccgtgccctctccccggatacctctgctctgccggtccctcc

SEQ ID NO: 11180 - DNA, 122 bp, Homo sapiens
  misc_feature (61)..(62): /note="This region represents a CpG dinucleotide"
  misc_feature (61)..(61): /note="Nucleotide may be methylated to form 5-methylcytosine"
gcatgtcattctcatactgttcatacagttcccttcctcatactgaaaaggccactaagccgtgtgttcccatgcctaatagactcttgagttttgaggccaaaagcagaagttgccaggta

SEQ ID NO: 11181 - DNA, 122 bp, Homo sapiens
  misc_feature (61)..(62): /note="This region represents a CpG dinucleotide"
  misc_feature (61)..(61): /note="Nucleotide may be methylated to form 5-methylcytosine"
cctgccatgtgccaggcataggctgagcattctacatatatggtctttatgagagccctacgaagcaggtgctattttagtaaccctgtttaacagatgagtaaagaggtttagagagatga

SEQ ID NO: 11182 - DNA, 122 bp, Homo sapiens
  misc_feature (61)..(62): /note="This region represents a CpG dinucleotide"
  misc_feature (61)..(61): /note="Nucleotide may be methylated to form 5-methylcytosine"
gtgagtaatcggtagtgcgtgcaggccctcggagatccctgaggtgtgattattttcatgcgtacatttctgtcgtcatcctccaaagggtgctttgtcatttccttcactctttcctcact

SEQ ID NO: 11183 - DNA, 122 bp, Homo sapiens
  misc_feature (61)..(62): /note="This region represents a CpG dinucleotide"
  misc_feature (61)..(61): /note="Nucleotide may be methylated to form 5-methylcytosine"
ttgtccataaatacagcatattgaagcaacccaaactctatggcccaactttacaagtgacgaaaagtactctgtgtttagaagagattgttgagacatcactcgggtgtgctcaaagagtg

SEQ ID NO: 11184 - DNA, 122 bp, Homo sapiens
  misc_feature (61)..(62): /note="This region represents a CpG dinucleotide"
  misc_feature (61)..(61): /note="Nucleotide may be methylated to form 5-methylcytosine"
gcctcccccgatcatgcagcccagagcccgaccacgaggaccatgctggggcctggggaacggcttcattaccagccactctgcagcaacaggagcactctgggcttgagaacccttggtat

SEQ ID NO: 11185 - DNA, 122 bp, Homo sapiens
  misc_feature (61)..(62): /note="This region represents a CpG dinucleotide"
  misc_feature (61)..(61): /note="Nucleotide may be methylated to form 5-methylcytosine"
gaaccagcaaagcaagagaggagttgcaatggctagaattgtgtaacttgccttcagccacgtagccatggtggcagagctaggatttgaattcaagtctttgtgactcattgtcatgaggc

SEQ ID NO: 11186 - DNA, 122 bp, Homo sapiens
  misc_feature (61)..(62): /note="This region represents a CpG dinucleotide"
  misc_feature (61)..(61): /note="Nucleotide may be methylated to form 5-methylcytosine"
gtgctacaagtatcacagggttgacgaggatggcagccccacctggaagggctttataagcgctgagattctggaggcagtctcttgagaattcataactctctaggtaactgcattagtca

SEQ ID NO: 11187 - DNA, 122 bp, Homo sapiens
  misc_feature (61)..(62): /note="This region represents a CpG dinucleotide"
  misc_feature (61)..(61): /note="Nucleotide may be methylated to form 5-methylcytosine"
ggtggggctggggggagggggtgttgtgcaatgcagttctctttcctaattcacagatcacgttacacccagcttgcacggtttgaacttgggtgctaaaggagaagcacctggggtatgtt

SEQ ID NO: 11188 - DNA, 122 bp, Homo sapiens
  misc_feature (61)..(62): /note="This region represents a CpG dinucleotide"
  misc_feature (61)..(61): /note="Nucleotide may be methylated to form 5-methylcytosine"
atgaagaacactgcactccaattcgtcactgaattaatttcctgagtaaggaggagaaggcggtattattttcaggacaaagattagcttcatcgctgccaaaagcttggtgttacactagg

SEQ ID NO: 11189 - DNA, 122 bp, Homo sapiens
  misc_feature (61)..(62): /note="This region represents a CpG dinucleotide"
  misc_feature (61)..(61): /note="Nucleotide may be methylated to form 5-methylcytosine"
aaatagtactttggcagaaccctgcatcccatgagatgtctgggccacccagaacagtcacgtcccctgagcctgagctgaaacagcacatcacccttggggaattgttgcactggccaagc

SEQ ID NO: 11190 - DNA, 122 bp, Homo sapiens
  misc_feature (61)..(62): /note="This region represents a CpG dinucleotide"
  misc_feature (61)..(61): /note="Nucleotide may be methylated to form 5-methylcytosine"
gaaagacacaaacctgtctgtcttctccacctgctgattatagatccctagggccttaagcgaacataggcaatagccaggtagtagttacattgaaccttgggtgagatccagtgctatgc

SEQ ID NO: 11191 - DNA, 122 bp, Homo sapiens
  misc_feature (61)..(62): /note="This region represents a CpG dinucleotide"
  misc_feature (61)..(61): /note="Nucleotide may be methylated to form 5-methylcytosine"
tgtttgtgtatacgaggaaggtggagtcaccggttcttcgtggccatcagaggaccgacacgcccataggtctcatgcattaagtctgcgttgagcaatccctaacacggtttttgcctaca

SEQ ID NO: 11192 - DNA, 122 bp, Homo sapiens
  misc_feature (61)..(62): /note="This region represents a CpG dinucleotide"
  misc_feature (61)..(61): /note="Nucleotide may be methylated to form 5-methylcytosine"
aaagcagcccagaatcagggcatcaagccttacactgaggcactcttgggctttgtcaagcggccccatggacagtgactctgcccatggctagaggacagtgactcaccccaggcttcaag

SEQ ID NO: 11193 - DNA, 122 bp, Homo sapiens
  misc_feature (61)..(62): /note="This region represents a CpG dinucleotide"
  misc_feature (61)..(61): /note="Nucleotide may be methylated to form 5-methylcytosine"
aaggcttctggtccagtgccctatgccccagatgagaggactgaggcccagaccaggaagcgaattgtctaagactcttccaaggtccccacccagtgagttagtggcaaagctggaaaggc

SEQ ID NO: 11194 - DNA, 122 bp, Homo sapiens
  misc_feature (61)..(62): /note="This region represents a CpG dinucleotide"
  misc_feature (61)..(61): /note="Nucleotide may be methylated to form 5-methylcytosine"
catgcagtcagccttccagggcacagaacagggtgaagagaaacagcagggacaaatggacgatgtctagcaccttgctgctcaatctggggttcttggaccagcagcactggtatcaccag

SEQ ID NO: 11195 - DNA, 122 bp, Homo sapiens
  misc_feature (61)..(62): /note="This region represents a CpG dinucleotide"
  misc_feature (61)..(61): /note="Nucleotide may be methylated to form 5-methylcytosine"
ctcaagtgatcctcccacctcagcctctggagtatctgggattacaggcatgcaccatcacgcccagatgattaatttttgttggagacagggtcttcctattgtgtccaggctgatctcaa

SEQ ID NO: 11196 - DNA, 122 bp, Homo sapiens
  misc_feature (61)..(62): /note="This region represents a CpG dinucleotide"
  misc_feature (61)..(61): /note="Nucleotide may be methylated to form 5-methylcytosine"
ttggtcatctgtactagaatgaaggtcataagaaggcgcagtctctgcctgattcattggcgtgtccctcgtaccactagagggtgtgactagttgatttctgtttgatgactgacatcttc

SEQ ID NO: 11197 - DNA, 122 bp, Homo sapiens
  misc_feature (61)..(62): /note="This region represents a CpG dinucleotide"
  misc_feature (61)..(61): /note="Nucleotide may be methylated to form 5-methylcytosine"
tatgctgctcagcatcccacaatgcacggaagctgcctatgtacagaatatccaggatggcgcggtggctcatgcctataatcccagcactttggaaggccaaggcaggtggattacctgag

SEQ ID NO: 11198 - DNA, 122 bp, Homo sapiens
  misc_feature (61)..(62): /note="This region represents a CpG dinucleotide"
  misc_feature (61)..(61): /note="Nucleotide may be methylated to form 5-methylcytosine"
atctaataacctcctcttggctgaagttgaagatgccatatcaactgatagaagcccatgcgaagctgaccagagctacaaaagttagaaaaacaaaaattgctaatttctactggtgacat

SEQ ID NO: 11199 - DNA, 122 bp, Homo sapiens
  misc_feature (61)..(62): /note="This region represents a CpG dinucleotide"
  misc_feature (61)..(61): /note="Nucleotide may be methylated to form 5-methylcytosine"
aacagcctggaaacctcgcctcaagggtgccccaggctgccagagctctctgcccctgcccgccagctcctccctgtaagtggtaatttggagcacccttaatggcccagttcaggagctgc

SEQ ID NO: 11200 - DNA, 122 bp, Homo sapiens
  misc_feature (61)..(62): /note="This region represents a CpG dinucleotide"
  misc_feature (61)..(61): /note="Nucleotide may be methylated to form 5-methylcytosine"
ctcccatgcaggatccggggatggccccagctgggccctcctgacattggagcaggggcccggctcacctggatttggggtgcggggcggctgaggctcacgcccagagccttctttagcag

SEQ ID NO: 11201 - DNA, 122 bp, Homo sapiens
  misc_feature (61)..(62): /note="This region represents a CpG dinucleotide"
  misc_feature (61)..(61): /note="Nucleotide may be methylated to form 5-methylcytosine"
atgaaaagtcaatgttcctctcaagaattatgcaaatgtcctcagggatttatagtgtcacggtgtccctcaggctccaagctgttattgacactaaactagcttggtatatggatcatgtt

SEQ ID NO: 11202 - DNA, 122 bp, Homo sapiens
  misc_feature (61)..(62): /note="This region represents a CpG dinucleotide"
  misc_feature (61)..(61): /note="Nucleotide may be methylated to form 5-methylcytosine"
gttaacactgccctggagctcattgagcatttcctgggttcggcaggcaggaagcaccagcgtgttctggatgaaaatagttcctgcctgctggctctccacagctaactcgcctttccaca

SEQ ID NO: 11203 - DNA, 122 bp, Homo sapiens
  misc_feature (61)..(62): /note="This region represents a CpG dinucleotide"
  misc_feature (61)..(61): /note="Nucleotide may be methylated to form 5-methylcytosine"
cagcaggcgccgcttctgtgtccaccgagtcagctgggatccatgcagctggtggcttgtcggtggcaggccaaggcctgagtcatgtccccgtcacagccttcagtggagggctgacccac

SEQ ID NO: 11204 - DNA, 122 bp, Homo sapiens
  misc_feature (61)..(62): /note="This region represents a CpG dinucleotide"
  misc_feature (61)..(61): /note="Nucleotide may be methylated to form 5-methylcytosine"
aaattctacagttatgatatttttataattatgctcttttgtaatcagtttgattgcatacgtgtgaaagtgctctgggagaaaaattcaatatagatgcaaggtatgactaacagcttttg

SEQ ID NO: 11205 - DNA, 122 bp, Homo sapiens
  misc_feature (61)..(62): /note="This region represents a CpG dinucleotide"
  misc_feature (61)..(61): /note="Nucleotide may be methylated to form 5-methylcytosine"
aatggctaaattgaggtaattagcatatgtgattaactttagactttaaggatatgtactcgtcataatggtctctattagccaggaacctgacaggaaacagatggctcattcaaattaga

SEQ ID NO: 11206 - DNA, 122 bp, Homo sapiens
  misc_feature (61)..(62): /note="This region represents a CpG dinucleotide"
  misc_feature (61)..(61): /note="Nucleotide may be methylated to form 5-methylcytosine"
cctgccctggtcaccctagggctaggtacaagacaattagggacagcccctacctcctagcgccgtctgtaatgattcagactagctacttatcctaatcctgctcatcctgctgcaccttc

SEQ ID NO: 11207 - DNA, 122 bp, Homo sapiens
  misc_feature (61)..(62): /note="This region represents a CpG dinucleotide"
  misc_feature (61)..(61): /note="Nucleotide may be methylated to form 5-methylcytosine"
gtacttagagcagtgatcgtttcagtaacaattctctgtatacatttccaggcccaatgacgcaggaagcagagggaggggagaggctggagagaagaaaaagatccagagatctcctgcaa

SEQ ID NO: 11208 - DNA, 122 bp, Homo sapiens
  misc_feature (61)..(62): /note="This region represents a CpG dinucleotide"
  misc_feature (61)..(61): /note="Nucleotide may be methylated to form 5-methylcytosine"
ggcatcatttccactcacaggcatccaacagcaccttgtcacatggcacacctagacgcacggaagatgcacctagagctactttgcagcaggctggctgggccccattcccggctgcctta

SEQ ID NO: 11209 - DNA, 122 bp, Homo sapiens
  misc_feature (61)..(62): /note="This region represents a CpG dinucleotide"
  misc_feature (61)..(61): /note="Nucleotide may be methylated to form 5-methylcytosine"
attcaatacaatgtggattattacttgagttaaacagaaatattccacaaccgagccacccgctttcctaggtaccagctgtgaaaattaccacagccttgcctgtccataaaacatggccc

SEQ ID NO: 11210 - DNA, 122 bp, Homo sapiens
  misc_feature (61)..(62): /note="This region represents a CpG dinucleotide"
  misc_feature (61)..(61): /note="Nucleotide may be methylated to form 5-methylcytosine"
ccctgccaaacaggtttccataaagcactcatttgccaagaagttccgggtgtttctgaccgtgaacttaagctcaagtttcccctaaacctgctttttttccattggtaaccctgcacata

SEQ ID NO: 11211 - DNA, 122 bp, Homo sapiens
  misc_feature (61)..(62): /note="This region represents a CpG dinucleotide"
  misc_feature (61)..(61): /note="Nucleotide may be methylated to form 5-methylcytosine"
ttcagggcggcggggctggggacgggacacttccttgctgccgtgagcggggcccacacgcgtcccagcttggagccagcgcacggccacggccacacgcgctcggaaagcgaggccggcga

SEQ ID NO: 11212 - DNA, 122 bp, Homo sapiens
  misc_feature (61)..(62): /note="This region represents a CpG dinucleotide"
  misc_feature (61)..(61): /note="Nucleotide may be methylated to form 5-methylcytosine"
tggactgacaaacaacaaacccacagtaaaacgagaggaagtgctggggaggccagctgtcggcttgagccaagcagtaggaactcaatgtatgcaggttctaggaggaaagagataataat

SEQ ID NO: 11213 - DNA, 122 bp, Homo sapiens
  misc_feature (61)..(62): /note="This region represents a CpG dinucleotide"
  misc_feature (61)..(61): /note="Nucleotide may be methylated to form 5-methylcytosine"
tcacagatttgtccttgtttaatttttacctagaaggaaccaaggaaattaagtaacttacgtagccagtatagcaactcttgtgagcttgagatgagcatgagcaaaaatggaagaaagga

SEQ ID NO: 11214 - DNA, 122 bp, Homo sapiens
  misc_feature (61)..(62): /note="This region represents a CpG dinucleotide"
  misc_feature (61)..(61): /note="Nucleotide may be methylated to form 5-methylcytosine"
tccaaactatagccctgctcttgcctcccctccagccctgctgcccccagttcagcccggcgacacacagcagccagaaaggtcttaagaggaaattactgcctgccactcccctgcttaaa

SEQ ID NO: 11215 - DNA, 122 bp, Homo sapiens
  misc_feature (61)..(62): /note="This region represents a CpG dinucleotide"
  misc_feature (61)..(61): /note="Nucleotide may be methylated to form 5-methylcytosine"
atttgctcagtgataaggtctacagagcctatgacctaagtgctttcagtgcaatgctaacggaattacagagcaaggaagaggccctgaccttggtttctattattgggatgaatggtact

SEQ ID NO: 11216 - DNA, 122 bp, Homo sapiens
  misc_feature (61)..(62): /note="This region represents a CpG dinucleotide"
  misc_feature (61)..(61): /note="Nucleotide may be methylated to form 5-methylcytosine"
ctggagagagcttgctgggtctgaagcggggcagccctgctcagctctgtccattgttgccgtgtgagaatgctggccctgtgttgccaaatcttctgattttgtttccaagagaaaccaga

SEQ ID NO: 11217 - DNA, 122 bp, Homo sapiens
  misc_feature (61)..(62): /note="This region represents a CpG dinucleotide"
  misc_feature (61)..(61): /note="Nucleotide may be methylated to form 5-methylcytosine"
cagcccctgaccaagcacagtgtccccaaggcctggtccaggcaatggagatggcactaccgtccacaagtgtcagcatatagtgccaaggtgtgtgttctcagacttgtcactctcccaag

SEQ ID NO: 11218 - DNA, 122 bp, Homo sapiens
  misc_feature (61)..(62): /note="This region represents a CpG dinucleotide"
  misc_feature (61)..(61): /note="Nucleotide may be methylated to form 5-methylcytosine"
ttcatactacatgtagattttaatgagtcagcacagcctgctaaaccaagcttctggcaccgagagcctttttaaaactcatctaaacactattattgatcattcacaagtggtggttaaat

SEQ ID NO: 11219 - DNA, 122 bp, Homo sapiens
  misc_feature (61)..(62): /note="This region represents a CpG dinucleotide"
  misc_feature (61)..(61): /note="Nucleotide may be methylated to form 5-methylcytosine"
cctagagttaagtcatagtctaacccagccaggagtgtgttcagcctggaaaaaggtggacggtgactgcacagctgcatgacctagtcaacatttaccagaaggagctggaagagcacaca

SEQ ID NO: 11220 - DNA, 122 bp, Homo sapiens
  misc_feature (61)..(62): /note="This region represents a CpG dinucleotide"
  misc_feature (61)..(61): /note="Nucleotide may be methylated to form 5-methylcytosine"
ctcatttaatcctcccagaaaacctgcagggtcagaatcattactccattttacggatgccggatgtcttctcagctaatcctcccatccaatcctctgggaagcctttcaggatgccccac

SEQ ID NO: 11221 - DNA, 122 bp, Homo sapiens
  misc_feature (61)..(62): /note="This region represents a CpG dinucleotide"
  misc_feature (61)..(61): /note="Nucleotide may be methylated to form 5-methylcytosine"
acctaagccaaggtggccctctcagtttcttttgtaatagctgtactgtcaacagaggcacgcagccccaggccactttctaagacccaaaccagccagatatctctttgacaacatctata

SEQ ID NO: 11222 - DNA, 122 bp, Homo sapiens
  misc_feature (61)..(62): /note="This region represents a CpG dinucleotide"
  misc_feature (61)..(61): /note="Nucleotide may be methylated to form 5-methylcytosine"
agcctgccttgttaatagattttattttttgaatgttgactatggacaggatttggcttgcgtgtgataattggtaaccatatgactaataggaggaggttttataattggtctgctcttgt

SEQ ID NO: 11223 - DNA, 122 bp, Homo sapiens
  misc_feature (61)..(62): /note="This region represents a CpG dinucleotide"
  misc_feature (61)..(61): /note="Nucleotide may be methylated to form 5-methylcytosine"
tgttttacagggtgtttgtttccatggctggcatagctaggacctcaccttcaggcccatcgccctttctctcaaaaggttttcagtttgctagaagccactttcctccctcactttactta

SEQ ID NO: 11224 - DNA, 122 bp, Homo sapiens
  misc_feature (61)..(62): /note="This region represents a CpG dinucleotide"
  misc_feature (61)..(61): /note="Nucleotide may be methylated to form 5-methylcytosine"
aattatttaaacagctgttaatattgcaatctctgcccagttctttctcatgcaaatccacgtgagtcctggttcaaggcaagctcagcttatcgtgcaaatcatcctctgtgactcagaag

SEQ ID NO: 11225 - DNA, 122 bp, Homo sapiens
  misc_feature (61)..(62): /note="This region represents a CpG dinucleotide"
  misc_feature (61)..(61): /note="Nucleotide may be methylated to form 5-methylcytosine"
tccccagtgtgtgtgacttcagcctgcactagaccatttgaccgacctaatcattttgttcgtaagagcttcaagaacatctaattgagcattcccagcctttgactgtttaaccctgagtc

SEQ ID NO: 11226 - DNA, 122 bp, Homo sapiens
  misc_feature (61)..(62): /note="This region represents a CpG dinucleotide"
  misc_feature (61)..(61): /note="Nucleotide may be methylated to form 5-methylcytosine"
gctgccaataaaattgattgatttgatttgaatcatattcagcaccctggagtcactgcacgtcagcagcagcaccatgtgtgtagtaggcacttggtgcctactacaaaaggcacaaaagc

SEQ ID NO: 11227 - DNA, 122 bp, Homo sapiens
  misc_feature (61)..(62): /note="This region represents a CpG dinucleotide"
  misc_feature (61)..(61): /note="Nucleotide may be methylated to form 5-methylcytosine"
agaaactggctctgcaggtgctgaccttgcaggttcagatctgagagaggatttactcttcgcttagttgtgaggcccaagcgcagccccctcccctccccgggctgtgctttgtctcctgg

SEQ ID NO: 11228 - DNA, 122 bp, Homo sapiens
  misc_feature (61)..(62): /note="This region represents a CpG dinucleotide"
  misc_feature (61)..(61): /note="Nucleotide may be methylated to form 5-methylcytosine"
ataaaaggtgcgaggcagcaagcagaacattcacatgggtactctgggggttcctgcccacgcttaggtctctgatgcactcaagcctcatgattcatccatggctgtgtaccttgacacca

SEQ ID NO: 11229 - DNA, 122 bp, Homo sapiens
  misc_feature (61)..(62): /note="This region represents a CpG dinucleotide"
  misc_feature (61)..(61): /note="Nucleotide may be methylated to form 5-methylcytosine"
accctgaatattgactgggtagagatttaaacagcatgcatgcaatagaattggcctcatcgccccatctgtagaacacaagcctgtgaaatccagtgtgtctgtgtgacatgcaattagct

SEQ ID NO: 11230 - DNA, 122 bp, Homo sapiens
  misc_feature (61)..(62): /note="This region represents a CpG dinucleotide"
  misc_feature (61)..(61): /note="Nucleotide may be methylated to form 5-methylcytosine"
ggtttgtctggcctggacagtgagcttactgttgtcacctccaggttgccctgggagaaccgggtctagagcaggacctgtcaccatttccaacaccatttctcttctgaaagggtgcctaa

SEQ ID NO: 11231 - DNA, 122 bp, Homo sapiens
  misc_feature (61)..(62): /note="This region represents a CpG dinucleotide"
  misc_feature (61)..(61): /note="Nucleotide may be methylated to form 5-methylcytosine"
agcttctagttgggaaccacaggaccagctgagttacaactcactcactggtccaggtgacgtcagctggttgtcagaaatgcaaaagtcagaataacatctcagaaggccaatcttaggtt

SEQ ID NO: 11232 - DNA, 122 bp, Homo sapiens
  misc_feature (61)..(62): /note="This region represents a CpG dinucleotide"
  misc_feature (61)..(61): /note="Nucleotide may be methylated to form 5-methylcytosine"
gtgcttagcacagacctatcattgtgtagctgtcaatgccttagctttagaagaataaaacgcatatctccacctcctatgtcatttgacagcttattaataaaacttgataatcattatgc

SEQ ID NO: 11233 - DNA, 122 bp, Homo sapiens
  misc_feature (61)..(62): /note="This region represents a CpG dinucleotide"
  misc_feature (61)..(61): /note="Nucleotide may be methylated to form 5-methylcytosine"
agcgagatgaccagtttctggcaggcctaatcactggcttaattctctctaagcacataacgtggtgtcttactgaatataatctatgggtcactttactgactgaggaagactcaacaaca

SEQ ID NO: 11234 - DNA, 122 bp, Homo sapiens
  misc_feature (61)..(62): /note="This region represents a CpG dinucleotide"
  misc_feature (61)..(61): /note="Nucleotide may be methylated to form 5-methylcytosine"
cttgtcccttgaggctggtgtgcagtgtgcacttctgctgaccaagcaattcattcctatcgctttgagtctaagccttaaagtaatccccaaccctgcaactgaacaaaaggaaaccacta

SEQ ID NO: 11235 - DNA, 122 bp, Homo sapiens
  misc_feature (61)..(62): /note="This region represents a CpG dinucleotide"
  misc_feature (61)..(61): /note="Nucleotide may be methylated to form 5-methylcytosine"
gcaaatacagccctgattccttcaaagttgtaaaatgctgagcaagcctctcagtctcctcgtcttctgcttccttatttgtaaaataacagtattggggtagatgatgtcaggaccttcct

SEQ ID NO: 11236 - DNA, 122 bp, Homo sapiens
  misc_feature (61)..(62): /note="This region represents a CpG dinucleotide"
  misc_feature (61)..(61): /note="Nucleotide may be methylated to form 5-methylcytosine"
aacttggaagcaaatctgctcctcgttgagccttgagatcccgtctgataccttaactaccgtggtgagacactctgagccagaggtatccaactaagctatacctggactcctgacccaca

SEQ ID NO: 11237 - DNA, 122 bp, Homo sapiens
  misc_feature (61)..(62): /note="This region represents a CpG dinucleotide"
  misc_feature (61)..(61): /note="Nucleotide may be methylated to form 5-methylcytosine"
aaattgctcaagtccctcactgaatcagagctccacatgtgtgaacacatggtagaatggcgctgtggttaagaaatccgtactaacttaacaaaggacatcatactaccttctcataggtg

SEQ ID NO: 11238 - DNA, 122 bp, Homo sapiens
  misc_feature (61)..(62): /note="This region represents a CpG dinucleotide"
  misc_feature (61)..(61): /note="Nucleotide may be methylated to form 5-methylcytosine"
gtgcacatgaagtcaaagtggaagtaagctattaagatcttagtatgagtcaaaaagggccggctgacagtccttggctatatgactgggagcaagtgccttaacctttctcaacatcagtt

SEQ ID NO: 11239 - DNA, 122 bp, Homo sapiens
  misc_feature (61)..(62): /note="This region represents a CpG dinucleotide"
  misc_feature (61)..(61): /note="Nucleotide may be methylated to form 5-methylcytosine"
tcagcaggtgcataaattatttcttcctttagttccactccactggtgactcttaggtcacgttcctccatcccacaatgcaaattcacgcagatggcatttgctattctacagtacatttg

SEQ ID NO: 11240 - DNA, 122 bp, Homo sapiens
  misc_feature (61)..(62): /note="This region represents a CpG dinucleotide"
  misc_feature (61)..(61): /note="Nucleotide may be methylated to form 5-methylcytosine"
atgcttctgcttgttcagtctttcagctcacagcaggatgctaatccatgaaggtgacctcgcagtactggttaattaagctttattgctcactgaaaaagaaaaaaaatctagccaggtat

SEQ ID NO: 11241 - DNA, 122 bp, Homo sapiens
  misc_feature (61)..(62): /note="This region represents a CpG dinucleotide"
  misc_feature (61)..(61): /note="Nucleotide may be methylated to form 5-methylcytosine"
aactcttatagtactcccagtcagcatatgatggaaaacatgcggtatgttcctggactccgtctccgtccaaaacatgaagggattactaaacccctcccaattactataaaagaagacag

SEQ ID NO: 11242 - DNA, 122 bp, Homo sapiens
  misc_feature (61)..(62): /note="This region represents a CpG dinucleotide"
  misc_feature (61)..(61): /note="Nucleotide may be methylated to form 5-methylcytosine"
cagatacaaccgtgtggccctgcatggtgcacagcacctgcttccctggggctgactgtacgtgacacataaactgctgtccatctggtctgtccagctttgggtgttatccccatagggtg

SEQ ID NO: 11243 - DNA, 122 bp, Homo sapiens
  misc_feature (61)..(62): /note="This region represents a CpG dinucleotide"
  misc_feature (61)..(61): /note="Nucleotide may be methylated to form 5-methylcytosine"
tcaataaataacttacagaaaaatgaaagccaggcacagcttatggaggaagtgccataacgagtagagatttacttaaagggtgaataatagctaggcaggcaaagaaaggagttgtcaga

SEQ ID NO: 11244 - DNA, 122 bp, Homo sapiens
  misc_feature (61)..(62): /note="This region represents a CpG dinucleotide"
  misc_feature (61)..(61): /note="Nucleotide may be methylated to form 5-methylcytosine"
ccgcaccaggactgcccttcaacttgctgccacacacccgtcgagggcgcactggcctaacgtagtttagaacaaaggcattgcctactgcaggcatggttataccagggaatgacaataaa

SEQ ID NO: 11245 - DNA, 122 bp, Homo sapiens
  misc_feature (61)..(62): /note="This region represents a CpG dinucleotide"
  misc_feature (61)..(61): /note="Nucleotide may be methylated to form 5-methylcytosine"
caaagtgatagtaaatgcattaagtgcttcatgagaaactctagagtcacagagacaggccgtcctccatctggatgtcactaggacataatgcatgctctctggctcacactgaggacaac

SEQ ID NO: 11246 - DNA, 122 bp, Homo sapiens
  misc_feature (61)..(62): /note="This region represents a CpG dinucleotide"
  misc_feature (61)..(61): /note="Nucleotide may be methylated to form 5-methylcytosine"
cagaaggtcttcctggcttgacaaatggtgggctgccatctccaaagaggctggttgtttcgccagcagagataatcctattgcaggtaggggtggagtgggtaagagtgagtgtagaaggc

SEQ ID NO: 11247 - DNA, 122 bp, Homo sapiens
  misc_feature (61)..(62): /note="This region represents a CpG dinucleotide"
  misc_feature (61)..(61): /note="Nucleotide may be methylated to form 5-methylcytosine"
ttcattgctaagttctaaagccgtcatgactggatcttcactagacaatgacaggtaagccggacttgccaggcctttataggcattaatcctagatctggagtggctaaacgagtcatgct

SEQ ID NO: 11248 - DNA, 122 bp, Homo sapiens
  misc_feature (61)..(62): /note="This region represents a CpG dinucleotide"
  misc_feature (61)..(61): /note="Nucleotide may be methylated to form 5-methylcytosine"
tctactctatcttcctggaagttcctgtttattttttatgtccttttcctctggctagaccgtaagagacttacgaaacaaacacttacacattctactaaactcaatgtccaaagtttgtg

SEQ ID NO: 11249 - DNA, 122 bp, Homo sapiens
  misc_feature (61)..(62): /note="This region represents a CpG dinucleotide"
  misc_feature (61)..(61): /note="Nucleotide may be methylated to form 5-methylcytosine"
tgtaattcttgtcccactggttcttgtaagttagagtgacagtgtgcctggcacagtcaccgctaacagtgcaaggcattgtcttaaaaccattgcagatggtttgatcctgctagcaacct

SEQ ID NO: 11250 - DNA, 122 bp, Homo sapiens
  misc_feature (61)..(62): /note="This region represents a CpG dinucleotide"
  misc_feature (61)..(61): /note="Nucleotide may be methylated to form 5-methylcytosine"
cctcctgatcttttaaagtgcattttacttcctggaaagttgggttcgctggttttcaggcggcaagtttgtgccataaggatgaaggcatgctttagagatggcatagcagtgagatggaa

SEQ ID NO: 11251 - DNA, 122 bp, Homo sapiens
  misc_feature (61)..(62): /note="This region represents a CpG dinucleotide"
  misc_feature (61)..(61): /note="Nucleotide may be methylated to form 5-methylcytosine"
gaccggttataccaacacatttttggaggacaagagcaataacttattcagtccttacagcgtgacagacattgttctaagtgttttacacattgttcactcctttaaacaacctaaaaggt

SEQ ID NO: 11252 - DNA, 122 bp, Homo sapiens
  misc_feature (61)..(62): /note="This region represents a CpG dinucleotide"
  misc_feature (61)..(61): /note="Nucleotide may be methylated to form 5-methylcytosine"
ttgaagaggccatcgggttactaaatggcattttggtcaccttttctttcctcccaagatcgtgaagaacaacctcattgccctaatgactcccaacttctgtctgcacgtgggtttgattg

SEQ ID NO: 11253 - DNA, 122 bp, Homo sapiens
  misc_feature (61)..(62): /note="This region represents a CpG dinucleotide"
  misc_feature (61)..(61): /note="Nucleotide may be methylated to form 5-methylcytosine"
aatgtgtggatccatcattgacctgttttgtttccagtgtggggctatcacacataaagccgctgtgagcactcatgtgcaagtctctttgtggacatctgctttcacttctcttgggtaaa

SEQ ID NO: 11254 - DNA, 122 bp, Homo sapiens
  misc_feature (61)..(62): /note="This region represents a CpG dinucleotide"
  misc_feature (61)..(61): /note="Nucleotide may be methylated to form 5-methylcytosine"
gctgacatcaccatttcagcagctttgcacaggcatcactgggttggtgcttcatattttcgatgcttctgcagctagtattccagcaagaacttgctcaacaccttttcatgtacaacaca

SEQ ID NO: 11255 - DNA, 122 bp, Homo sapiens
  misc_feature (61)..(62): /note="This region represents a CpG dinucleotide"
  misc_feature (61)..(61): /note="Nucleotide may be methylated to form 5-methylcytosine"
tcataacttcttcacttataaaatatctcataagtttgggcttagcccagtgccttcacacgactgacagctgtcgtaattccagggcttaaggactagggtccaaagtcacatctcccaac

SEQ ID NO: 11256 - DNA, 122 bp, Homo sapiens
  misc_feature (61)..(62): /note="This region represents a CpG dinucleotide"
  misc_feature (61)..(61): /note="Nucleotide may be methylated to form 5-methylcytosine"
aatgaataaacgaacttaaacaagggcatgagacaatcagaaactcctccatgaggcatccgtttcccacttgtaatggtgtttccacgccaagcctcacctcccctagctgactctcattt

SEQ ID NO: 11257 - DNA, 122 bp, Homo sapiens
  misc_feature (61)..(62): /note="This region represents a CpG dinucleotide"
  misc_feature (61)..(61): /note="Nucleotide may be methylated to form 5-methylcytosine"
tggttctacatctaaatctttagctagatttaccaattctcatatagcacgtaagaaatccgggctatgaaacaaaaggaaataagcacattcacctttcctgctatccctcatttcctcca

SEQ ID NO: 11258 - DNA, 122 bp, Homo sapiens
  misc_feature (61)..(62): /note="This region represents a CpG dinucleotide"
  misc_feature (61)..(61): /note="Nucleotide may be methylated to form 5-methylcytosine"
aactcctgggcttaagtgattctcccgcctcagcctcctgagtagctggtattatcggtacgtgccaccacacctgacttgaattgttttcaatgactgagaagcttaggttcagaagaagt

SEQ ID NO: 11259 - DNA, 122 bp, Homo sapiens
  misc_feature (61)..(62): /note="This region represents a CpG dinucleotide"
  misc_feature (61)..(61): /note="Nucleotide may be methylated to form 5-methylcytosine"
tcccttgccatgtaacgtaacttaccaacaagattctgaggcttaagacattgacatcttcgagtaggtcattatttggcatataattccttctgtcactcacattcagtgttactggaact

SEQ ID NO: 11260 - DNA, 122 bp, Homo sapiens
  misc_feature (61)..(62): /note="This region represents a CpG dinucleotide"
  misc_feature (61)..(61): /note="Nucleotide may be methylated to form 5-methylcytosine"
ttaatcctggcaataacctctgaatcatgcatcattatccacacttcacatatgaggaaacgaaagctcaaggagattgtgtgacttgcttagtctcatccagtttgtaagtggtggaggcc

SEQ ID NO: 11261 - DNA, 122 bp, Homo sapiens
  misc_feature (61)..(62): /note="This region represents a CpG dinucleotide"
  misc_feature (61)..(61): /note="Nucleotide may be methylated to form 5-methylcytosine"
gcaagcaaggatgcccgacgggagcctcgacctgggctgcaggccctggggtccgtacaacgccgacagcagctctgcctgtgacccaggccagcctgacgcatggcccagggcagaacatg

SEQ ID NO: 11262 - DNA, 122 bp, Homo sapiens
  misc_feature (61)..(62): /note="This region represents a CpG dinucleotide"
  misc_feature (61)..(61): /note="Nucleotide may be methylated to form 5-methylcytosine"
ctttgttgaaggcttccttcataacaccgggatgaattgatggttcttctttgctctcagcgtacattgtccacaccttcatgctgggagtggattagtcattttgcaaggaacatttttta

SEQ ID NO: 11263 - DNA, 122 bp, Homo sapiens
  misc_feature (61)..(62): /note="This region represents a CpG dinucleotide"
  misc_feature (61)..(61): /note="Nucleotide may be methylated to form 5-methylcytosine"
gcattttgaaatatgacacaccctgggagaaatcattcctggcaggagctcttggtgagccgtgctcatcccattcaaggttgatgaatagaacattaagaataattagcacaagactgtct

SEQ ID NO: 11264 - DNA, 122 bp, Homo sapiens
  misc_feature (61)..(62): /note="This region represents a CpG dinucleotide"
  misc_feature (61)..(61): /note="Nucleotide may be methylated to form 5-methylcytosine"
gcaggcctatttgtcagtgggctgcccctgtttgttgtaatctataatattactgcctcccgtggccccagagcagctgccgcgggagaatccagggatggtgggcgctaggtgtgcgctga

SEQ ID NO: 11265 - DNA, 122 bp, Homo sapiens
  misc_feature (61)..(62): /note="This region represents a CpG dinucleotide"
  misc_feature (61)..(61): /note="Nucleotide may be methylated to form 5-methylcytosine"
acatacctgcatgagaaaggttagtcagctgtgcctgacaaaatctccaagtctcttccccgccctctgccagaggagatgccctcttccgcatgccagccactcaccctccagagaggact

SEQ ID NO: 11266 - DNA, 122 bp, Homo sapiens
  misc_feature (61)..(62): /note="This region represents a CpG dinucleotide"
  misc_feature (61)..(61): /note="Nucleotide may be methylated to form 5-methylcytosine"
gtgtctatgcccaatggcactttcctcctgaagctttgtaacagcagagaacaatgaacacgtacagctgaggcaacaaggaacctaaagaaactcctcctcaaatccctccagccccagtg

SEQ ID NO: 11267 - DNA, 122 bp, Homo sapiens
  misc_feature (61)..(62): /note="This region represents a CpG dinucleotide"
  misc_feature (61)..(61): /note="Nucleotide may be methylated to form 5-methylcytosine"
ttagtctggagcatctaggaacccctagaagcattgttctagtcactttccatttcaaatcggaggggtgtgtctcatgttgagccagtataacaattgacttcatctttcctggctcgggt

SEQ ID NO: 11268 - DNA, 122 bp, Homo sapiens
  misc_feature (61)..(62): /note="This region represents a CpG dinucleotide"
  misc_feature (61)..(61): /note="Nucleotide may be methylated to form 5-methylcytosine"
gttatagactttatcttcccaaaacattcaaatcacatattagccaaatcacttagataccgtcctaagtgctggaactctttaagtcttgttagcagaaaaggctaaagtttaggtaaata

SEQ ID NO: 11269 - DNA, 122 bp, Homo sapiens
  misc_feature (61)..(62): /note="This region represents a CpG dinucleotide"
  misc_feature (61)..(61): /note="Nucleotide may be methylated to form 5-methylcytosine"
ttacaggcatgagccacctcgctggcctaagtctcttttagtacaggcagggtttcatcacgttggccaggctggttttgaactcctgacctcaagcgatccacctgcctcggcctcccaaa

SEQ ID NO: 11270 - DNA, 122 bp, Homo sapiens
  misc_feature (61)..(62): /note="This region represents a CpG dinucleotide"
  misc_feature (61)..(61): /note="Nucleotide may be methylated to form 5-methylcytosine"
acctcaacatctttccacagaacgtgtgctctttactaacaaccgacacacaaaggaggacgatctccaacagaggtgactaggaaaggcttcctggatggcgtaatttagtgttggagtca

SEQ ID NO: 11271 - DNA, 122 bp, Homo sapiens
  misc_feature (61)..(62): /note="This region represents a CpG dinucleotide"
  misc_feature (61)..(61): /note="Nucleotide may be methylated to form 5-methylcytosine"
gtaaggttttaccccagcagagtgaaacaaagtcagggttaggaacttgggctttcaagtcgacagggctgtgttgaaatcctggtctgtggggcagtgcagaggggcgggtgcattttaat

SEQ ID NO: 11272 - DNA, 122 bp, Homo sapiens
  misc_feature (61)..(62): /note="This region represents a CpG dinucleotide"
  misc_feature (61)..(61): /note="Nucleotide may be methylated to form 5-methylcytosine"
tcaggttccccagcaccgccactgccatctgttatgtctcctagcagggttgcagctagtcgactggctcagcaaggaagtgatttaattgttcctgcaggtattcactgcactgattggat

SEQ ID NO: 11273 - DNA, 122 bp, Homo sapiens
  misc_feature (61)..(62): /note="This region represents a CpG dinucleotide"
  misc_feature (61)..(61): /note="Nucleotide may be methylated to form 5-methylcytosine"
atttgattaatatttaagctaattgtatttctagaacatatgactcagatcaatggtgagcggtggtaaaaagcttatattagaaaagtactaaagtctaatgtttgctgacttcactgttt

SEQ ID NO: 11274 - DNA, 122 bp, Homo sapiens
  misc_feature (61)..(62): /note="This region represents a CpG dinucleotide"
  misc_feature (61)..(61): /note="Nucleotide may be methylated to form 5-methylcytosine"
cccgcttcggcctcctaaaatgctgggattacagtcgtgagccaccatgcccagccaatacgtttctttttgataacttgaaatgagatttgcataaggtgaaaagtgagtggaaattgtag

SEQ ID NO: 11275 - DNA, 122 bp, Homo sapiens
  misc_feature (61)..(62): /note="This region represents a CpG dinucleotide"
  misc_feature (61)..(61): /note="Nucleotide may be methylated to form 5-methylcytosine"
ccgaactccctgtgctacttaatggccctgtactcatgccatttcttctatctgaaataccgttccctgccctgccacccccaacccctcctttgcccccaaataacttctcagggcttcat

SEQ ID NO: 11276 - DNA, 122 bp, Homo sapiens
  misc_feature (61)..(62): /note="This region represents a CpG dinucleotide"
  misc_feature (61)..(61): /note="Nucleotide may be methylated to form 5-methylcytosine"
ggcaccatccaaaaaggcaaataaatgccgaggtcacataagtgtcatacatctctggggcgatacactgcttaacagcaagtgagatcaagtttcaggttggatttgggcgagtgtgtgtg

SEQ ID NO: 11277 - DNA, 122 bp, Homo sapiens
  misc_feature (61)..(62): /note="This region represents a CpG dinucleotide"
  misc_feature (61)..(61): /note="Nucleotide may be methylated to form 5-methylcytosine"
ggtataataatataatgaaatgtttttagaaaggttccaccaatggtgagaaggagccaacggccaatctccagggcagcacgtgaagatttgatgtagagcatatttccaccacttttatg

SEQ ID NO: 11278 - DNA, 122 bp, Homo sapiens
  misc_feature (61)..(62): /note="This region represents a CpG dinucleotide"
  misc_feature (61)..(61): /note="Nucleotide may be methylated to form 5-methylcytosine"
gggccttcaacaacctctacagggcagagcaggcctggctgcttccccaggccagctgcacggggaccttccatgtgggttaaatgtccacaccccaggcaaagcctaaagcacacactgga

SEQ ID NO: 11279 - DNA, 122 bp, Homo sapiens
  misc_feature (61)..(62): /note="This region represents a CpG dinucleotide"
  misc_feature (61)..(61): /note="Nucleotide may be methylated to form 5-methylcytosine"
gcaggtcatcagtgttttacatccaacaaactaatggtcatttgctgctttataaagagccgatataattttgtcttccttgttattaaaggatcaagcaagggtgtttctgtaccagttca

SEQ ID NO: 11280 - DNA, 122 bp, Homo sapiens
  misc_feature (61)..(62): /note="This region represents a CpG dinucleotide"
  misc_feature (61)..(61): /note="Nucleotide may be methylated to form 5-methylcytosine"
gagagccatgtgggtggttgtccttcaggttttgtcaattgtataaaactgacttgccatcgttcaccttcttctaaatttgcacttttcactataggcatgatgtatgtcaaacctcatta

SEQ ID NO: 11281 - DNA, 122 bp, Homo sapiens
  misc_feature (61)..(62): /note="This region represents a CpG dinucleotide"
  misc_feature (61)..(61): /note="Nucleotide may be methylated to form 5-methylcytosine"
tgtcaagtccctgctggtgcaggtttgtctggtagcaccagtgaggtggcccccacccatcgccatcccagaaaccctcccttggacacacctggaaggtgctaagtgcaccgggcagagga

SEQ ID NO: 11282 - DNA, 122 bp, Homo sapiens
  misc_feature (61)..(62): /note="This region represents a CpG dinucleotide"
  misc_feature (61)..(61): /note="Nucleotide may be methylated to form 5-methylcytosine"
gagaaatgcatcactaggcaatttcattgttgtgcgaacatcaccacacctggatggtggcgcctactacacacctaggctacagggtacagtctattcctccttggctacaaacctgtaca

SEQ ID NO: 11283 - DNA, 122 bp, Homo sapiens
  misc_feature (61)..(62): /note="This region represents a CpG dinucleotide"
  misc_feature (61)..(61): /note="Nucleotide may be methylated to form 5-methylcytosine"
cataggacttccttccttcaacacactgagaggccctatatcaactggtggagtcatttccgaactcaggaagtgctacatctccctgctggctctggtttccactaaagacatgcatctcc

SEQ ID NO: 11284 - DNA, 122 bp, Homo sapiens
  misc_feature (61)..(62): /note="This region represents a CpG dinucleotide"
  misc_feature (61)..(61): /note="Nucleotide may be methylated to form 5-methylcytosine"
gagacagcttgatctcggaaagcagaagtggaagtccctgttgttggctcacagctttagcgcactgacctgtcggtcacaagcctttcctggaacctggtgggtttcaaatgcaagtggct

SEQ ID NO: 11285 - DNA, 122 bp, Homo sapiens
  misc_feature (61)..(62): /note="This region represents a CpG dinucleotide"
  misc_feature (61)..(61): /note="Nucleotide may be methylated to form 5-methylcytosine"
ctaattcttcaaacttggtattgactccccaagtaaacaacaactgaaaagtattggtaacgtctttagattcatcaagagccaaggaattgcattcttaaaccctcttggtggcttccctg

SEQ ID NO: 11286 - DNA, 122 bp, Homo sapiens
  misc_feature (61)..(62): /note="This region represents a CpG dinucleotide"
  misc_feature (61)..(61): /note="Nucleotide may be methylated to form 5-methylcytosine"
ttaaacactttccaacatccaatgagcacttatacaaagattgctttttatttcatttaccgccttctcagctgtttatgagtcaaactgtttcctggtactgttgctgtaggtgtatattg

SEQ ID NO: 11287 - DNA, 122 bp, Homo sapiens
  misc_feature (61)..(62): /note="This region represents a CpG dinucleotide"
  misc_feature (61)..(61): /note="Nucleotide may be methylated to form 5-methylcytosine"
gtctttattattacaaatagttctgcattgagcagcctggtaccgatgccacattttgcacgtgtgcagattacctgtagtagaattgggaggggatggtgtgtgcagctttagaggtgcca

SEQ ID NO: 11288 - DNA, 122 bp, Homo sapiens
  misc_feature (61)..(62): /note="This region represents a CpG dinucleotide"
  misc_feature (61)..(61): /note="Nucleotide may be methylated to form 5-methylcytosine"
gccgcagtggtggcggtggcggagagcgcggcggagtgagtgcggctgtggacccgggaccgggcgccgctgggcgggcgcggcagggtcccggatccgtcctccgtgacgcgccggcttcc

SEQ ID NO: 11289 - DNA, 122 bp, Homo sapiens
  misc_feature (61)..(62): /note="This region represents a CpG dinucleotide"
  misc_feature (61)..(61): /note="Nucleotide may be methylated to form 5-methylcytosine"
ctcatgtctcccatgcccagactttaacttttccagaaagcttcagaatggggctgactccgtctgctgctcttccctgtctcttgggatctcccttaatagaggaccctggggctcagtcc

SEQ ID NO: 11290 - DNA, 122 bp, Homo sapiens
  misc_feature (61)..(62): /note="This region represents a CpG dinucleotide"
  misc_feature (61)..(61): /note="Nucleotide may be methylated to form 5-methylcytosine"
tctggaagatcatcgcagaaccagtaacatgacccatcgcctccacaaggcgcggcgtctcgactgttcttagagtgtatttctagtaaaatcagaagctcaccaaagcaacatgcttgaga

SEQ ID NO: 11291 - DNA, 122 bp, Homo sapiens
  misc_feature (61)..(62): /note="This region represents a CpG dinucleotide"
  misc_feature (61)..(61): /note="Nucleotide may be methylated to form 5-methylcytosine"
ttcctaatgctctccctcccaggagcctggtctctaggcgcaactgagctggtgactcaccggacaactgtgcaaggtacctctctatgactcagttgcctcatctgcaaaatgaaaggaat

SEQ ID NO: 11292 - DNA, 122 bp, Homo sapiens
  misc_feature (61)..(62): /note="This region represents a CpG dinucleotide"
  misc_feature (61)..(61): /note="Nucleotide may be methylated to form 5-methylcytosine"
gtctcacagaaggcatgtccttcaatgccaaggtccaacatgaactcaggtgtgatgagtcgtgcagacttgtctgtctctactctcctaatgctccctttccacaaaatgaaataaggtaa

SEQ ID NO: 11293 - DNA, 122 bp, Homo sapiens
  misc_feature (61)..(62): /note="This region represents a CpG dinucleotide"
  misc_feature (61)..(61): /note="Nucleotide may be methylated to form 5-methylcytosine"
taatgcacttagaacactgagcaagcatgtgtcatacacgcaggagtgtgacagagaaagcgcaaataggccacaggaagccaggccaggggtcatccaggtctccatctcaaaacaggagg

SEQ ID NO: 11294 - DNA, 122 bp, Homo sapiens
  misc_feature (61)..(62): /note="This region represents a CpG dinucleotide"
  misc_feature (61)..(61): /note="Nucleotide may be methylated to form 5-methylcytosine"
ctgagcaaggacctgggctcagagcagatatttccaagttttaacaaaacaaaatctcagcgggttttaatataatccaaatagtaggtgctcagagatttggcacacaaagcaggttagtg

SEQ ID NO: 11295 - DNA, 122 bp, Homo sapiens
  misc_feature (61)..(62): /note="This region represents a CpG dinucleotide"
  misc_feature (61)..(61): /note="Nucleotide may be methylated to form 5-methylcytosine"
agttgtcagttaatacagtgatggtctaagctttgcatctaagcttgtgcccagaggttccgtgcctagaagacaggcaggctggcatgaagcacatggttaaatattctggttccatgtgt

SEQ ID NO: 11296 - DNA, 122 bp, Homo sapiens
  misc_feature (61)..(62): /note="This region represents a CpG dinucleotide"
  misc_feature (61)..(61): /note="Nucleotide may be methylated to form 5-methylcytosine"
ttgaggatgaacccagtctggaatctgagtccactgtatacccatgaggcctgtctgtaccgtgcaagagagcaaatgtaggtctacaagacatctgtctaaatgtttaaaacttatgagtt

SEQ ID NO: 11297 - DNA, 122 bp, Homo sapiens
  misc_feature (61)..(62): /note="This region represents a CpG dinucleotide"
  misc_feature (61)..(61): /note="Nucleotide may be methylated to form 5-methylcytosine"
ctcaagtgatttgcctgccttggcctcccaaaatgctgggattacaggcatgagccactacgcctggcctgaacagatttcatatcgtgtatttgcatgtccagaaagtgatcccatagcct

SEQ ID NO: 11298 - DNA, 122 bp, Homo sapiens
  misc_feature (61)..(62): /note="This region represents a CpG dinucleotide"
  misc_feature (61)..(61): /note="Nucleotide may be methylated to form 5-methylcytosine"
tggaatctgaagcctctgggctgcctatgactcaccctgccctaataccttgccctaatacgctattgctgagagtgctgcagggagacaaggctgctctctggtttatcctgcgtcccatg

SEQ ID NO: 11299 - DNA, 122 bp, Homo sapiens
  misc_feature (61)..(62): /note="This region represents a CpG dinucleotide"
  misc_feature (61)..(61): /note="Nucleotide may be methylated to form 5-methylcytosine"
atctgacgaataccttgtccttaatctatgtgaatcatactgactacacatatagtttaccgcactttgttcttagacaaaggtgcatgccagaaaaatggcttgcaatccttttgcaaagc

SEQ ID NO: 11300 - DNA, 122 bp, Homo sapiens
  misc_feature (61)..(62): /note="This region represents a CpG dinucleotide"
  misc_feature (61)..(61): /note="Nucleotide may be methylated to form 5-methylcytosine"
agaataaattaaaaggagaaatcaaaacagaacaagaaaagccagagaacataaggataccgatagaaaaaatgcgatcagggaaataagagagaatttaaaaacaaaaggaaaaagtgggg

SEQ ID NO: 11301 - DNA, 122 bp, Homo sapiens
  misc_feature (61)..(62): /note="This region represents a CpG dinucleotide"
  misc_feature (61)..(61): /note="Nucleotide may be methylated to form 5-methylcytosine"
atcagcttgcttagtgacttggggaacttaacgtcacaattctatctcttccttctttcacgcttgcaaaatagtgtttgagacacatacttttttttttttttttgagtcagagtctcgct

SEQ ID NO: 11302 - DNA, 122 bp, Homo sapiens
  misc_feature (61)..(62): /note="This region represents a CpG dinucleotide"
  misc_feature (61)..(61): /note="Nucleotide may be methylated to form 5-methylcytosine"
tgtctgccttttttcagtttagaatgatgattttaatggtgctagatcattgtataggtacgtaaataaagactaagggtgtgtttgtacagatgggagtgtgtaagacacgtttttcccaa

SEQ ID NO: 11303 - DNA, 122 bp, Homo sapiens
  misc_feature (61)..(62): /note="This region represents a CpG dinucleotide"
  misc_feature (61)..(61): /note="Nucleotide may be methylated to form 5-methylcytosine"
ctgggccagtcacttcacttctctgcaacttgccttgctctgtgaaatgtagataataatcgttcatacccatggggttatactggaattaaatataacagtatgtacaaagggacataaac

SEQ ID NO: 11304 - DNA, 122 bp, Homo sapiens
  misc_feature (61)..(62): /note="This region represents a CpG dinucleotide"
  misc_feature (61)..(61): /note="Nucleotide may be methylated to form 5-methylcytosine"
gggttgcctcaaaaagattcaagaaaacccagagctctgcctggctttcttccacacacacgtaggcaagtctcttcacgattccaaaccctcagcctcagggcgccctactgtgcaacaag

SEQ ID NO: 11305 - DNA, 122 bp, Homo sapiens
  misc_feature (61)..(62): /note="This region represents a CpG dinucleotide"
  misc_feature (61)..(61): /note="Nucleotide may be methylated to form 5-methylcytosine"
acattctggataggtatccctgatgcctcctctcctcccctagtcctcccttcccctgtccgcacctttctcaggagcatcagccccaccctggaggacacagatgatgactcagtgcagcc

SEQ ID NO: 11306 - DNA, 122 bp, Homo sapiens
  misc_feature (61)..(62): /note="This region represents a CpG dinucleotide"
  misc_feature (61)..(61): /note="Nucleotide may be methylated to form 5-methylcytosine"
ggctacatatggactcagagcaaacatgtgctgtgatcaattaatgctgcctgctgtaggcgtgggaggaggaagtgatgacttgtgtgcatgtattggccaaccctggacctcccagctct

SEQ ID NO: 11307 - DNA, 122 bp, Homo sapiens
  misc_feature (61)..(62): /note="This region represents a CpG dinucleotide"
  misc_feature (61)..(61): /note="Nucleotide may be methylated to form 5-methylcytosine"
ggaaagagaccagacctggaaaagacagagtcaaagctgggtgagcaggccttcgaagggcgtggctcagcaaagataatccatattgtagtgcaagaggattcttgtggaatatgttttac

SEQ ID NO: 11308 - DNA, 122 bp, Homo sapiens
  misc_feature (61)..(62): /note="This region represents a CpG dinucleotide"
  misc_feature (61)..(61): /note="Nucleotide may be methylated to form 5-methylcytosine"
aaaaaaaagtagtgaaaatgtatggtttattaatgtaatcagcttgttattattagcatgcgtacttaatagccacaaaataaagcttaccagagatggtgtatttcggtccttgtgaaata

SEQ ID NO: 11309 - DNA, 122 bp, Homo sapiens
  misc_feature (61)..(62): /note="This region represents a CpG dinucleotide"
  misc_feature (61)..(61): /note="Nucleotide may be methylated to form 5-methylcytosine"
ggtcggtgatccactgcaagctgtccttcgcatagttttctactgccatcacttcatggacgcttagaaaggttttcttccttgcttggtaggggagggccatcagagtcaatagaatggcc

SEQ ID NO: 11310 - DNA, 122 bp, Homo sapiens
  misc_feature (61)..(62): /note="This region represents a CpG dinucleotide"
  misc_feature (61)..(61): /note="Nucleotide may be methylated to form 5-methylcytosine"
ttaatcacagcataaaggcatgaagatgccacaggcagactctcagtcttcatcagtgaccgtgcttggaggcagtcatggctcgagcctgtggtggaagtgtgagggacagggtgggtctc

SEQ ID NO: 11311 - DNA, 122 bp, Homo sapiens
  misc_feature (61)..(62): /note="This region represents a CpG dinucleotide"
  misc_feature (61)..(61): /note="Nucleotide may be methylated to form 5-methylcytosine"
ttgaccccgtcatcaaactaagacacaacggctatgaccccagggtgatgaagcacacaacggatctggatgcatcaaaggtaggctccagcctccctctccttccccacgaagctggcact

SEQ ID NO: 11312 - DNA, 122 bp, Homo sapiens
  misc_feature (61)..(62): /note="This region represents a CpG dinucleotide"
  misc_feature (61)..(61): /note="Nucleotide may be methylated to form 5-methylcytosine"
ggactggtttttctggaggaaaaatactgggagcccatttgctgaatgtgcaaaatgacacgctctgccaacaggtgctccagtgacaaaggagcctcagcccgagagtgggtcacacaaga

SEQ ID NO: 11313 - DNA, 122 bp, Homo sapiens
  misc_feature (61)..(62): /note="This region represents a CpG dinucleotide"
  misc_feature (61)..(61): /note="Nucleotide may be methylated to form 5-methylcytosine"
ataaggttcccagtggttgcagtgaagggacagtagataggccttggcctggaccatttacgcctttgcaaggctggaaggaagttacatgagcactcagccgagggctaatgtggcaaaag

SEQ ID NO: 11314 - DNA, 122 bp, Homo sapiens
  misc_feature (61)..(62): /note="This region represents a CpG dinucleotide"
  misc_feature (61)..(61): /note="Nucleotide may be methylated to form 5-methylcytosine"
gggcagtggtgatgctgacgagctgtgccttcagctcactctgatgggcattgggagggtcggtcttagctgtcagcttggtcaggcgatgagcccaggtatccagtcgaacatgaatccag

SEQ ID NO: 11315 - DNA, 122 bp, Homo sapiens
  misc_feature (61)..(62): /note="This region represents a CpG dinucleotide"
  misc_feature (61)..(61): /note="Nucleotide may be methylated to form 5-methylcytosine"
gagatcaagtcctaggccataaaacagaatctgctggtgatctgggactcgcccctcagacggtctagtgaaaagaggcagaatctatgatgggaagggctctaggtgagcaactctcttcc

SEQ ID NO: 11316 - DNA, 122 bp, Homo sapiens
  misc_feature (61)..(62): /note="This region represents a CpG dinucleotide"
  misc_feature (61)..(61): /note="Nucleotide may be methylated to form 5-methylcytosine"
ttaacaatctggatttctgcggtagcagggtggatcatataatgcttactcctgacaccacgcctgacacctattcagtttctcagctttactcaaagcctccatgacttagcaggttcagg

SEQ ID NO: 11317 - DNA, 122 bp, Homo sapiens
  misc_feature (61)..(62): /note="This region represents a CpG dinucleotide"
  misc_feature (61)..(61): /note="Nucleotide may be methylated to form 5-methylcytosine"
ctcaagtgatgtgcctgcctcagcctcccaaggtgcagggattacaggcgtgagccattgcgcccagcccaggcttagcatttttagtgcagtcaggtttgctgatgcagagagttgcgtaa

SEQ ID NO: 11318 - DNA, 122 bp, Homo sapiens
  misc_feature (61)..(62): /note="This region represents a CpG dinucleotide"
  misc_feature (61)..(61): /note="Nucleotide may be methylated to form 5-methylcytosine"
tctctggtggcgggtttccccggggatcccagaacagctagtgtcagctggggatgtgggcgcctagacaaggcccttggcagcctccaggcagctgggtgtgcagtgggtctccccagcag

SEQ ID NO: 11319 - DNA, 122 bp, Homo sapiens
  misc_feature (61)..(62): /note="This region represents a CpG dinucleotide"
  misc_feature (61)..(61): /note="Nucleotide may be methylated to form 5-methylcytosine"
gcttcttcccaaacaatagaaggtgtggggttttaaggaccaggtgcagggcgagagaagcgtgtttgcatgtgcagggcgggactccagatatgcctaattcataaatatatatgttcata

SEQ ID NO: 11320 - DNA, 122 bp, Homo sapiens
  misc_feature (61)..(62): /note="This region represents a CpG dinucleotide"
  misc_feature (61)..(61): /note="Nucleotide may be methylated to form 5-methylcytosine"
ctttgcttacacaacttgtctgtcttgtctgggcagtagatactttctccaaacatagagcgggctggactgtaggattccatttgttactgaaatttcttctgcttcccctcatgaccaaa

SEQ ID NO: 11321 - DNA, 122 bp, Homo sapiens
  misc_feature (61)..(62): /note="This region represents a CpG dinucleotide"
  misc_feature (61)..(61): /note="Nucleotide may be methylated to form 5-methylcytosine"
tgtctgcctttgtgctcagagaaggccttcacgcctttggttctcgtaaggtgctcgccacggcaacccaagtgtctaagcagggcatttgcaggggactgtccccacctcacaggcggcta

SEQ ID NO: 11322 - DNA, 122 bp, Homo sapiens
  misc_feature (61)..(62): /note="This region represents a CpG dinucleotide"
  misc_feature (61)..(61): /note="Nucleotide may be methylated to form 5-methylcytosine"
tgaatcccaagaaagttgcatttctaacaagtttctagctgctgcggctgctgatgatgacgatgatgattagagaacagctttgagactgttgctctgaggcctgtttatggccttaaatt

SEQ ID NO: 11323 - DNA, 122 bp, Homo sapiens
  misc_feature (61)..(62): /note="This region represents a CpG dinucleotide"
  misc_feature (61)..(61): /note="Nucleotide may be methylated to form 5-methylcytosine"
ttcagccttgtgacacactgagcagagaacccagtcatgatgggctgggcttctgacttacgaaactgtgagctagtagatgcctgttgcctaagccactaagtttgtggtaatttgttatg

SEQ ID NO: 11324 - DNA, 122 bp, Homo sapiens
  misc_feature (61)..(62): /note="This region represents a CpG dinucleotide"
  misc_feature (61)..(61): /note="Nucleotide may be methylated to form 5-methylcytosine"
ccagtgtcctttattggacatcactggccatctccacctgcccagaatccacagtatcaccgctcctactctgcaccacgcccagtcctgcccaagcagaggggcttcctctagtgctcaat

SEQ ID NO: 11325 - DNA, 122 bp, Homo sapiens
  misc_feature (61)..(62): /note="This region represents a CpG dinucleotide"
  misc_feature (61)..(61): /note="Nucleotide may be methylated to form 5-methylcytosine"
gctggaatgccaagtgagcattgcatctacttgaccaaggttgatgctgttccttcacaccgtgaagtgccttcagaggatttgcagagtcaccactttcctttgccttttcttccttgtga

SEQ ID NO: 11326 - DNA, 122 bp, Homo sapiens
  misc_feature (61)..(62): /note="This region represents a CpG dinucleotide"
  misc_feature (61)..(61): /note="Nucleotide may be methylated to form 5-methylcytosine"
tatttggacatgtgcacagcatgctcccacatgtacaaagcactcacacaaatatcctcacgcatgcgcatatggccttgggtgtctggagggacacgtggcacattgcaggctgtggctcc

SEQ ID NO: 11327 - DNA, 122 bp, Homo sapiens
  misc_feature (61)..(62): /note="This region represents a CpG dinucleotide"
  misc_feature (61)..(61): /note="Nucleotide may be methylated to form 5-methylcytosine"
ttgctattgctgtgttctacatgagaaagctgagggtctgaggattgagtcactaagtgacggctacttaagtggcaagcctggatggaaactcatgcctgtctgaattgtggctcagacat

SEQ ID NO: 11328 - DNA, 122 bp, Homo sapiens
  misc_feature (61)..(62): /note="This region represents a CpG dinucleotide"
  misc_feature (61)..(61): /note="Nucleotide may be methylated to form 5-methylcytosine"
cacggctgaggtcacctagggagtgcttgtggatgaacagggaagaggcccaagactggacgtggaggtctccaatgtttagagtcagggaaatgaaggacaccaacaaaactcacctaaga

SEQ ID NO: 11329 - DNA, 122 bp, Homo sapiens
  misc_feature (61)..(62): /note="This region represents a CpG dinucleotide"
  misc_feature (61)..(61): /note="Nucleotide may be methylated to form 5-methylcytosine"
caaatacttatgggaaatgctggattaaacagagttaagaagcatcagacatttccaggacgggctagcacatgccagggctctctaactgacctcattaggattcatctgtttcatggagg

SEQ ID NO: 11330 - DNA, 122 bp, Homo sapiens
  misc_feature (61)..(62): /note="This region represents a CpG dinucleotide"
  misc_feature (61)..(61): /note="Nucleotide may be methylated to form 5-methylcytosine"
aaggattagcctagaataaacatcaaggcagagctcctaaatgagtgaaacagcctgacacgccatagagggatgatactgagtgacagattgtggcatactagaaaatgcatggcctatct

SEQ ID NO: 11331 - DNA, 122 bp, Homo sapiens
  misc_feature (61)..(62): /note="This region represents a CpG dinucleotide"
  misc_feature (61)..(61): /note="Nucleotide may be methylated to form 5-methylcytosine"
cacctgtttattttggccagtttgttagcctgctctttttgtgtgtggttttcccctcttcgtaatagataactataatgcaattagttgtataagtagaagaaacttatgttttccttctt

SEQ ID NO: 11332 - DNA, 122 bp, Homo sapiens
  misc_feature (61)..(62): /note="This region represents a CpG dinucleotide"
  misc_feature (61)..(61): /note="Nucleotide may be methylated to form 5-methylcytosine"
tgggtgaggcccaagacgtggcggccacacttcctcccatgcccagggattctgagtctacgcaagcccaggcctgatccctgccatggtcactgcccagcagggaatctcctggagtgagg

SEQ ID NO: 11333 - DNA, 122 bp, Homo sapiens
  misc_feature (61)..(62): /note="This region represents a CpG dinucleotide"
  misc_feature (61)..(61): /note="Nucleotide may be methylated to form 5-methylcytosine"
aagggacttacctttgtccctgttcctacatccttctaggctctaactggtttgatgaagcgtgagtagctcagagatatacatgccaagaacggcctggaacagttttattgcccctcccc

SEQ ID NO: 11334 - DNA, 122 bp, Homo sapiens
  misc_feature (61)..(62): /note="This region represents a CpG dinucleotide"
  misc_feature (61)..(61): /note="Nucleotide may be methylated to form 5-methylcytosine"
cagtggttgaaggagtcagagctttaagatttccaaggagggagaggtcacagcaccgggcggctcaggaaggacttcctggggaagatggcatttgcgctgtcttgccgaatgagaacaga

SEQ ID NO: 11335 - DNA, 122 bp, Homo sapiens
  misc_feature (61)..(62): /note="This region represents a CpG dinucleotide"
  misc_feature (61)..(61): /note="Nucleotide may be methylated to form 5-methylcytosine"
ctgcagcctagtgctttgtgttaacaaacacccagtgtgagcttaacacaattgggcaggcgcagagctggccccagaatcttcctggagtaatgagggtctctcttcccctctgaccttgc

SEQ ID NO: 11336 - DNA, 122 bp, Homo sapiens
  misc_feature (61)..(62): /note="This region represents a CpG dinucleotide"
  misc_feature (61)..(61): /note="Nucleotide may be methylated to form 5-methylcytosine"
cgtctcttctacaagaggacagtcagaacaaacacaacacagtctcacatccaggggaaacgtgaatgaaatggcttcagaaagacccagacacccagaagtgccagcaccaggtgacagag

SEQ ID NO: 11337 - DNA, 122 bp, Homo sapiens
  misc_feature (61)..(62): /note="This region represents a CpG dinucleotide"
  misc_feature (61)..(61): /note="Nucleotide may be methylated to form 5-methylcytosine"
acaataccattattgacaacaatgacaaacattcactaagtcgttagcagagttagtttacggtgtaaagggtgattcagaaactcatttgtcactagtggattccttgaactagtaacaaa

SEQ ID NO: 11338 - DNA, 122 bp, Homo sapiens
  misc_feature (61)..(62): /note="This region represents a CpG dinucleotide"
  misc_feature (61)..(61): /note="Nucleotide may be methylated to form 5-methylcytosine"
tagcccctggaggacaatctatttcctccataataccatacaataaagatcacatcatatcgtaataaatctactaaacaaaatcaaggtgctggtgtctggtaagggccttctcactgtgc

SEQ ID NO: 11339 - DNA, 122 bp, Homo sapiens
  misc_feature (61)..(62): /note="This region represents a CpG dinucleotide"
  misc_feature (61)..(61): /note="Nucleotide may be methylated to form 5-methylcytosine"
gactgcgcctccctggggcacaggttgaacagttcacctacagcactgacatggcctaagcgaatgtcctgtcaatctgagagccaggtttctccctgtcacaggaagaaactacacataag

SEQ ID NO: 11340 - DNA, 122 bp, Homo sapiens
  misc_feature (61)..(62): /note="This region represents a CpG dinucleotide"
  misc_feature (61)..(61): /note="Nucleotide may be methylated to form 5-methylcytosine"
agatcactgcttgaccattaactacttggataaccttgagcaagtcacttaatctctccacgcctacttgtacaaactagttaacctcaaggttctgttgaagtcctagtttctcaccattc

SEQ ID NO: 11341 - DNA, 122 bp, Homo sapiens
  misc_feature (61)..(62): /note="This region represents a CpG dinucleotide"
  misc_feature (61)..(61): /note="Nucleotide may be methylated to form 5-methylcytosine"
tacacgtgtgggaaggggaagggtccattcacacagagacatgtgcacacacacggggcccgtagactttccttaccaccccaccctctgctcaagaaaagtccagcctaggagacaatgtg

SEQ ID NO: 11342 - DNA, 122 bp, Homo sapiens
  misc_feature (61)..(62): /note="This region represents a CpG dinucleotide"
  misc_feature (61)..(61): /note="Nucleotide may be methylated to form 5-methylcytosine"
gggtagaagaatctccagaaaagccagccagaacataaacacccaagtcctttctgccctcgcttcattccacaggctcctcattccttctgctccaatcctactggtcactcgagactggg

SEQ ID NO: 11343 - DNA, 122 bp, Homo sapiens
  misc_feature (61)..(62): /note="This region represents a CpG dinucleotide"
  misc_feature (61)..(61): /note="Nucleotide may be methylated to form 5-methylcytosine"
tttctttttgatgctctacaagtcaaaaattgcaacatacaccaaggagaaaacatgtggcgaagacaatgaaaaacagatccgggcctgccaaagaaagaggtggaaagacagaacctgtc

SEQ ID NO: 11344 - DNA, 122 bp, Homo sapiens
  misc_feature (61)..(62): /note="This region represents a CpG dinucleotide"
  misc_feature (61)..(61): /note="Nucleotide may be methylated to form 5-methylcytosine"
tgttagcagtgactgtgatcacagcgggagttgccaaaccaggctgggtgttggctgccacgtgagtaacaggggagttggagggaaacttgaggaccatgataacatcctgctgggctttg

SEQ ID NO: 11345 - DNA, 122 bp, Homo sapiens
  misc_feature (61)..(62): /note="This region represents a CpG dinucleotide"
  misc_feature (61)..(61): /note="Nucleotide may be methylated to form 5-methylcytosine"
ggtcagagcagccatgctgggcaatgcagagggaagaaagcttctgtcacctgagggcttcgggcaggactgagaaatttcctgagcaggtactgcttccaactgattcactcggccacagc

SEQ ID NO: 11346 - DNA, 122 bp, Homo sapiens
  misc_feature (61)..(62): /note="This region represents a CpG dinucleotide"
  misc_feature (61)..(61): /note="Nucleotide may be methylated to form 5-methylcytosine"
agaactgcagagagacctgttgctcctagctgggctcttaatgccaaacaaaagaagcaacgtgtcagtaattcagttggtggatgccttggagccattcaagatgcattttgctcattagc

SEQ ID NO: 11347 - DNA, 122 bp, Homo sapiens
  misc_feature (61)..(62): /note="This region represents a CpG dinucleotide"
  misc_feature (61)..(61): /note="Nucleotide may be methylated to form 5-methylcytosine"
caaccagagtgtacaaagcctgcaggcttcaggaatctgttatgaattcatctctggctgcgaccacacacatgtggtgaaatggtactctactggaaggattcagacatttaattcccaat

SEQ ID NO: 11348 - DNA, 122 bp, Homo sapiens
  misc_feature (61)..(62): /note="This region represents a CpG dinucleotide"
  misc_feature (61)..(61): /note="Nucleotide may be methylated to form 5-methylcytosine"
ctttccccagacccccagtcaccagcctggacaggtctgctgtgaccccagcagcaagatcgccccagacaggagaaggccctgctgggacagaggctgggagaggcaggaggcctctctct

SEQ ID NO: 11349 - DNA, 122 bp, Homo sapiens
  misc_feature (61)..(62): /note="This region represents a CpG dinucleotide"
  misc_feature (61)..(61): /note="Nucleotide may be methylated to form 5-methylcytosine"
ccacaagtgattaaacatggagtgaccacatgactcagcaattccactctgaggtatgtacgcaagagaaccgaaaacatcacgtcctcaatgtgtgcaaggctccccgattcacacctcca

SEQ ID NO: 11350 - DNA, 122 bp, Homo sapiens
  misc_feature (61)..(62): /note="This region represents a CpG dinucleotide"
  misc_feature (61)..(61): /note="Nucleotide may be methylated to form 5-methylcytosine"
accctaggtcatctggcctaattccttcatttgcagaagaggagacagacccagaaggctcggtgattgccccaagtcacatggctatgacagttgtgaccagccactccttctctgatgct

SEQ ID NO: 11351 - DNA, 122 bp, Homo sapiens
  misc_feature (61)..(62): /note="This region represents a CpG dinucleotide"
  misc_feature (61)..(61): /note="Nucleotide may be methylated to form 5-methylcytosine"
tctcactttttccaaaggtctctcttaatcctttgatcattctctgtggaagctcccatgcgtgtttcttcttctttaatccttaactagattgtttgccattggctttgagtggaatccag

SEQ ID NO: 11352 - DNA, 122 bp, Homo sapiens
  misc_feature (61)..(62): /note="This region represents a CpG dinucleotide"
  misc_feature (61)..(61): /note="Nucleotide may be methylated to form 5-methylcytosine"
tgcccttggtgaactggcaagctttccaggcctgaggagcggagggcgggatctggtacacggtctggccccacacacccctgcccgaagcctgtgcagctatcaatgccccaggccttccc

SEQ ID NO: 11353 - DNA, 122 bp, Homo sapiens
  misc_feature (61)..(62): /note="This region represents a CpG dinucleotide"
  misc_feature (61)..(61): /note="Nucleotide may be methylated to form 5-methylcytosine"
ctcaaggcatacacccaccttggcctcccaaagtgctgggattataggcgtgagccaccacgcctggcccagtctgtggcatttgttatgacagcccaagcaaagcaacacacaccttccca

SEQ ID NO: 11354 - DNA, 122 bp, Homo sapiens
  misc_feature (61)..(62): /note="This region represents a CpG dinucleotide"
  misc_feature (61)..(61): /note="Nucleotide may be methylated to form 5-methylcytosine"
ctaaccctaagggcttcccttgtgttgggcaacgtatccttcaaaaggcagggctgagttcggaaaaggcatcctgctaagcccccagccctgcacccagcacccacaactccagacccctg

SEQ ID NO: 11355 - DNA, 122 bp, Homo sapiens
  misc_feature (61)..(62): /note="This region represents a CpG dinucleotide"
  misc_feature (61)..(61): /note="Nucleotide may be methylated to form 5-methylcytosine"
caggtaccacagtatgacgcgacagctgctccgcaaggctgacggggtggtgctcatgtacgacatcacctcccaggagagctttgcccacgtgcgctactggctagactgtctccaggtga

SEQ ID NO: 11356 - DNA, 122 bp, Homo sapiens
  misc_feature (61)..(62): /note="This region represents a CpG dinucleotide"
  misc_feature (61)..(61): /note="Nucleotide may be methylated to form 5-methylcytosine"
gtaatagaatcataaaatgttagcactgcagcacatctcagggctgctgtctggaaaggccgtgtgacctaccaggtaagagtaggtctgaattgagaacctggatttctggactgtccagt

SEQ ID NO: 11357 - DNA, 122 bp, Homo sapiens
  misc_feature (61)..(62): /note="This region represents a CpG dinucleotide"
  misc_feature (61)..(61): /note="Nucleotide may be methylated to form 5-methylcytosine"
tttactcagtccctactcaagatgaagtcactctggtttgaacatctctgataatagaaccgctcagcaccccagctccattttccaaatcatccaatcaagccccagatcctaacacctcc

SEQ ID NO: 11358 - DNA, 122 bp, Homo sapiens
  misc_feature (61)..(62): /note="This region represents a CpG dinucleotide"
  misc_feature (61)..(61): /note="Nucleotide may be methylated to form 5-methylcytosine"
ctgctgattactcagccacgcccaagatcctgctactaccctggtttctggctccacattcgtcactattgagatgacttactggtcacagtaaaagcaagttgataaaggtggccagtggg

SEQ ID NO: 11359 - DNA, 122 bp, Homo sapiens
  misc_feature (61)..(62): /note="This region represents a CpG dinucleotide"
  misc_feature (61)..(61): /note="Nucleotide may be methylated to form 5-methylcytosine"
ccaaagcagtacataatttttgttaattgtgtttacaagtgtgacttcaggattacccagcggtttggaagctgattattcttagtctggagattgagtcatttattcatgaaatatttact

SEQ ID NO: 11360 - DNA, 122 bp, Homo sapiens
  misc_feature (61)..(62): /note="This region represents a CpG dinucleotide"
  misc_feature (61)..(61): /note="Nucleotide may be methylated to form 5-methylcytosine"
ttctggctctgtgacccggggagtctacctgtctgagcctcgactttctcattggtgaaacggtgatgataacagctcatatctcagaactgggtgtgaggatcaaattaggaaaatccgtt

SEQ ID NO: 11361 - DNA, 122 bp, Homo sapiens
  misc_feature (61)..(62): /note="This region represents a CpG dinucleotide"
  misc_feature (61)..(61): /note="Nucleotide may be methylated to form 5-methylcytosine"
catcacagagagcaatgcatagaaccaagtggaaagtccaaagcaaatcatgagtcgaaacgggcccagtgaacaggaaaatccagatgtggatttggcaaccaatggagcaagcagagccc

SEQ ID NO: 11362 - DNA, 122 bp, Homo sapiens
  misc_feature (61)..(62): /note="This region represents a CpG dinucleotide"
  misc_feature (61)..(61): /note="Nucleotide may be methylated to form 5-methylcytosine"
atctcggcctcccaaagtgctgggattataggcgtgagtcaccgcactcagccttcctggcggtgttttaaagcacatacagttagatacagaaagtcctaagataggaatgttttctatga

SEQ ID NO: 11363 - DNA, 122 bp, Homo sapiens
  misc_feature (61)..(62): /note="This region represents a CpG dinucleotide"
  misc_feature (61)..(61): /note="Nucleotide may be methylated to form 5-methylcytosine"
cttgaattccacaaaggagtcaagaaaatatcctgcttcaataccaggggggctatgcagcgatgttatgaatgaccatcagattagagagaagtggtgctgcagaagtcccgagaggagaa

SEQ ID NO: 11364 - DNA, 122 bp, Homo sapiens
  misc_feature (61)..(62): /note="This region represents a CpG dinucleotide"
  misc_feature (61)..(61): /note="Nucleotide may be methylated to form 5-methylcytosine"
caggatccacctgccttggcctcccaaagtgctaggattataggcttgaggcactgtgcccggcctatatattgtattttaaagttatgcattctgtgggagtcagctgaatttttgtgttg

SEQ ID NO: 11365 - DNA, 122 bp, Homo sapiens
  misc_feature (61)..(62): /note="This region represents a CpG dinucleotide"
  misc_feature (61)..(61): /note="Nucleotide may be methylated to form 5-methylcytosine"
ggggaatttcttcttccaaccattgttagtccagttcccagctaagaatctcctcttctccgagtggctgacctcagggattagcactcccttgaccagagatgatgtctacccacaggggt

SEQ ID NO: 11366 - DNA, 122 bp, Homo sapiens
  misc_feature (61)..(62): /note="This region represents a CpG dinucleotide"
  misc_feature (61)..(61): /note="Nucleotide may be methylated to form 5-methylcytosine"
tgcttgctcagctaagcactgatcctgctactgccagccattcgctgtgtggccttgtaacgtatgtaactgctctgtgcctcagctgtgtcatctgtgaaatgggaacaccaattattgct

SEQ ID NO: 11367 - DNA, 122 bp, Homo sapiens
  misc_feature (61)..(62): /note="This region represents a CpG dinucleotide"
  misc_feature (61)..(61): /note="Nucleotide may be methylated to form 5-methylcytosine"
cacaaactaggacctttacaccacattggaggcaatagccctgaggttaaagggccgttccgtgtctaaccactgaagctcttgcttgaaggaaggtttcccaaaatgaacccccaaagaaa

SEQ ID NO: 11368 - DNA, 122 bp, Homo sapiens
  misc_feature (61)..(62): /note="This region represents a CpG dinucleotide"
  misc_feature (61)..(61): /note="Nucleotide may be methylated to form 5-methylcytosine"
ctcagttcccttattcaaatagggatggccctacttccctgatagctttggtataagaaacgtggaacgttaggcacctagtaagtgcacagtgactatgctatgacttcttccctgccctc

SEQ ID NO: 11369 - DNA, 122 bp, Homo sapiens
  misc_feature (61)..(62): /note="This region represents a CpG dinucleotide"
  misc_feature (61)..(61): /note="Nucleotide may be methylated to form 5-methylcytosine"
tcttgcaactgctgccagtcttcagaaagattacatcagactggaaaaacctaggagagacgctgtaatgtcttagccgtggtgacctactggggcatcttataacccacttcaacgaggca

SEQ ID NO: 11370 - DNA, 122 bp, Homo sapiens
  misc_feature (61)..(62): /note="This region represents a CpG dinucleotide"
  misc_feature (61)..(61): /note="Nucleotide may be methylated to form 5-methylcytosine"
tcttcacgagtgccacagaatagaagaagtaatcagtttagttccagataaggcaaatcacggctgtaaaatcactaaattagacatggcccttcaggtaagctgcttggggaagcaagtga

SEQ ID NO: 11371 - DNA, 122 bp, Homo sapiens
  misc_feature (61)..(62): /note="This region represents a CpG dinucleotide"
  misc_feature (61)..(61): /note="Nucleotide may be methylated to form 5-methylcytosine"
tgggccatgatggagtcatagtcctggttgcttggccactgtgtctggacaaagagctgccgcagcaagtgccgctgctgggcagtctttttgcagctcactttgcctgggagctgctctgc

SEQ ID NO: 11372 - DNA, 122 bp, Homo sapiens
  misc_feature (61)..(62): /note="This region represents a CpG dinucleotide"
  misc_feature (61)..(61): /note="Nucleotide may be methylated to form 5-methylcytosine"
ttaggatcaccaggctgactcactgtcatacagattccaactacaaaaatcatctgggagcgccctccgaagtgctaggattctgctggctgttttatgaacagctcatactatgaagtgga

SEQ ID NO: 11373 - DNA, 122 bp, Homo sapiens
  misc_feature (61)..(62): /note="This region represents a CpG dinucleotide"
  misc_feature (61)..(61): /note="Nucleotide may be methylated to form 5-methylcytosine"
acccatgctaaggcacaagagttaagcatttggatggcaattaaaatcaacagggctgggcgtggtggctcatgcctgtaatcccagcactttggaaggccgaggtgggtggatcacctgag

SEQ ID NO: 11374 - DNA, 122 bp, Homo sapiens
  misc_feature (61)..(62): /note="This region represents a CpG dinucleotide"
  misc_feature (61)..(61): /note="Nucleotide may be methylated to form 5-methylcytosine"
gaataggtccaaaagtggcccagtctaagtaaaacagggagggaagactggattgacactcgcacactcatctgtctatgacaaagaacaaagaacctagaattttggcattgatgagtaat

SEQ ID NO: 11375 - DNA, 122 bp, Homo sapiens
  misc_feature (61)..(62): /note="This region represents a CpG dinucleotide"
  misc_feature (61)..(61): /note="Nucleotide may be methylated to form 5-methylcytosine"
gggctgatgatgcatagtgaagatttttgaggttttcccttcatccattagcctggcattcggtcactctcaaaacatgtattcagtgcttgctgtgtgcataagacactttgctctggggg

SEQ ID NO: 11376 - DNA, 122 bp, Homo sapiens
  misc_feature (61)..(62): /note="This region represents a CpG dinucleotide"
  misc_feature (61)..(61): /note="Nucleotide may be methylated to form 5-methylcytosine"
taagggtgccctaaggtcagggctggccctgagacaaattatgaaattatacaatatggccgggtgcagtgactcacgcctgtaatcccagcactttgggaggccgaggcgggtggatcaca

SEQ ID NO: 11377 - DNA, 122 bp, Homo sapiens
  misc_feature (61)..(62): /note="This region represents a CpG dinucleotide"
  misc_feature (61)..(61): /note="Nucleotide may be methylated to form 5-methylcytosine"
cacaaaatcagagggttctttttaatcattagctttacccatccatctggaaaaataaagcggtgtaaaagcctacaagcatcaggaagcaaagaagactggaagtacaggcttaactaagt

SEQ ID NO: 11378 - DNA, 122 bp, Homo sapiens
  misc_feature (61)..(62): /note="This region represents a CpG dinucleotide"
  misc_feature (61)..(61): /note="Nucleotide may be methylated to form 5-methylcytosine"
tgtccagccacagctgtagcttgaaggcttgaagttcaatgggacccacttctgcttccacgctttctttcctttaattttaatttttatttatttgagacagggtctggctctgtcaccaa

SEQ ID NO: 11379 - DNA, 122 bp, Homo sapiens
  misc_feature (61)..(62): /note="This region represents a CpG dinucleotide"
  misc_feature (61)..(61): /note="Nucleotide may be methylated to form 5-methylcytosine"
atgacattgccacccacagattaggaacaaagacgctggagtcttaagtcctcttggagacgcaaggtcttcaaagcttgctggcaaatgtgatagtcgtgttctttgccagggcctagaga

SEQ ID NO: 11380 - DNA, 122 bp, Homo sapiens
  misc_feature (61)..(62): /note="This region represents a CpG dinucleotide"
  misc_feature (61)..(61): /note="Nucleotide may be methylated to form 5-methylcytosine"
aatgcagattaatagttgggattggccggatttcccttggtcacctgtcctaaccccttgcgcaaacacaggtctatatgtggaaaccctacaaatacctgcccatccctttttaacattta

SEQ ID NO: 11381 - DNA, 122 bp, Homo sapiens
  misc_feature (61)..(62): /note="This region represents a CpG dinucleotide"
  misc_feature (61)..(61): /note="Nucleotide may be methylated to form 5-methylcytosine"
ttgtgcctgacctctccttccaggtggacttacacactgggctgtcggagttctcggtgacgcagcgccggctggcccatggctggaatgagtttgttgctgacaacagcgaacctgtgtgg

SEQ ID NO: 11382 - DNA, 122 bp, Homo sapiens
  misc_feature (61)..(62): /note="This region represents a CpG dinucleotide"
  misc_feature (61)..(61): /note="Nucleotide may be methylated to form 5-methylcytosine"
catgcactcctgtgtgctcagatggtggagtgggcagggcttgtcatatgacaaacccatcgctacctgtgaaaattactactatgcagatgttctccacccccaccctctgacagcctgca

SEQ ID NO: 11383 - DNA, 122 bp, Homo sapiens
  misc_feature (61)..(62): /note="This region represents a CpG dinucleotide"
  misc_feature (61)..(61): /note="Nucleotide may be methylated to form 5-methylcytosine"
gccgtgtattcagtgtcctggtactgacagaggatgggaacaagcttgcagataaagccacgctgggcacatgactctccaggctactggccacttgggcttatccagacagtctggacagg

SEQ ID NO: 11384 - DNA, 122 bp, Homo sapiens
  misc_feature (61)..(62): /note="This region represents a CpG dinucleotide"
  misc_feature (61)..(61): /note="Nucleotide may be methylated to form 5-methylcytosine"
gctctaaactaacaagtttaataagtcagcttcctaattcaaagaacaatagagtcagtacgtcggaaaggagaaaaagagtacttgctatatgtaagccatgaacagaagtaagaaataga

SEQ ID NO: 11385 - DNA, 122 bp, Homo sapiens
  misc_feature (61)..(62): /note="This region represents a CpG dinucleotide"
  misc_feature (61)..(61): /note="Nucleotide may be methylated to form 5-methylcytosine"
ctaactgaatgcctgacatttgtctaaattacaaaagccaaaattaaagctccccagtaccgtgacaacagaaatgagactctgcagcaaggctctggggatgcagatggacagagcaggtt

SEQ ID NO: 11386 - DNA, 122 bp, Homo sapiens
  misc_feature (61)..(62): /note="This region represents a CpG dinucleotide"
  misc_feature (61)..(61): /note="Nucleotide may be methylated to form 5-methylcytosine"
atacttacagacatttccttaataattctacctaactgtcattttccaacagtctcttcacgtgaatagtcaccgatcactgctgggtgcagtggctcatgcctgtaatcccagcactttgg

SEQ ID NO: 11387 - DNA, 122 bp, Homo sapiens
  misc_feature (61)..(62): /note="This region represents a CpG dinucleotide"
  misc_feature (61)..(61): /note="Nucleotide may be methylated to form 5-methylcytosine"
tggccagagacctatggatcatgactacatcccactgtcagatgacacactgggcagctacgacctgttggatccaaaatgtgagactcaaattactaaggcaattagtggcagggacagga

SEQ ID NO: 11388 - DNA, 122 bp, Homo sapiens
  misc_feature (61)..(62): /note="This region represents a CpG dinucleotide"
  misc_feature (61)..(61): /note="Nucleotide may be methylated to form 5-methylcytosine"
aaaggcggagaaaccaagccttgcatatatataaacatgaccccttacctgggatatggtcgatgcagctgtagtgacaatctcagagcagcttctacaccacagccatttccagcatgaag

SEQ ID NO: 11389 - DNA, 122 bp, Homo sapiens
  misc_feature (61)..(62): /note="This region represents a CpG dinucleotide"
  misc_feature (61)..(61): /note="Nucleotide may be methylated to form 5-methylcytosine"
cgggcccagctgtgctctcccggcgccaggtgtctgtgtgcctggcctctgggagggctccggagagctccttctgacctgtgacttagaaactgagggtgcagcatcactatccttgctac

SEQ ID NO: 11390 - DNA, 122 bp, Homo sapiens
  misc_feature (61)..(62): /note="This region represents a CpG dinucleotide"
  misc_feature (61)..(61): /note="Nucleotide may be methylated to form 5-methylcytosine"
ggttggtcaagtggacagaggagtcacatctgactggtggtcaaactggcacatgtttatcgcattctaatcttttatctaacaatggtttcttaatttctgcttctttgtattttgcattt

SEQ ID NO: 11391 - DNA, 122 bp, Homo sapiens
  misc_feature (61)..(62): /note="This region represents a CpG dinucleotide"
  misc_feature (61)..(61): /note="Nucleotide may be methylated to form 5-methylcytosine"
caatttctatagtattcagcacagtaacttgctgtacaggtttactagcctaggagcattcggctgtaccatatagcttacaggcataataagctacaaaattactatctaggtttgtgtac

SEQ ID NO: 11392 - DNA, 122 bp, Homo sapiens
  misc_feature (61)..(62): /note="This region represents a CpG dinucleotide"
  misc_feature (61)..(61): /note="Nucleotide may be methylated to form 5-methylcytosine"
ccgggctcaagtgatcctctcacctcagcctccccaaaatgctaggattacagaggtgagcgactgtgcctggctgatgccttgctgtataaactgcagcctgctggctctccctctccaac

SEQ ID NO: 11393 - DNA, 122 bp, Homo sapiens
  misc_feature (61)..(62): /note="This region represents a CpG dinucleotide"
  misc_feature (61)..(61): /note="Nucleotide may be methylated to form 5-methylcytosine"
ctggaaccgaagggagtcagtggagcatctcttaccatttccatgcccagtgttaattgtcgtcgggaaattacagactcagatgaagttccatgccacagcaaatgggatcgggcttttcc

SEQ ID NO: 11394 - DNA, 122 bp, Homo sapiens
  misc_feature (61)..(62): /note="This region represents a CpG dinucleotide"
  misc_feature (61)..(61): /note="Nucleotide may be methylated to form 5-methylcytosine"
cccatgagcaagtctctgctcgtgggagtggacaggtagtctgagcgaggaactttgctgcgtaagtcataaatgggttgagagatctgcattactgcagttaatctagcccattctgactg

SEQ ID NO: 11395 - DNA, 122 bp, Homo sapiens
  misc_feature (61)..(62): /note="This region represents a CpG dinucleotide"
  misc_feature (61)..(61): /note="Nucleotide may be methylated to form 5-methylcytosine"
tgacctcgtgatccgcccgccttggcctcccaaagtgctgggattacaggcatgagccaccgctcctggctgagtctgcgatttcttgccagctctacccagttgtgtcatcttaagcaagt

SEQ ID NO: 11396 - DNA, 122 bp, Homo sapiens
  misc_feature (61)..(62): /note="This region represents a CpG dinucleotide"
  misc_feature (61)..(61): /note="Nucleotide may be methylated to form 5-methylcytosine"
agaatgaaagaaacagcaaacacagggagctggttgcagctcatcaagaccgtcccattacgttcccgagtcagtccacaggcacctattgttgacattaggacttttcatttactcaagct

SEQ ID NO: 11397 - DNA, 122 bp, Homo sapiens
  misc_feature (61)..(62): /note="This region represents a CpG dinucleotide"
  misc_feature (61)..(61): /note="Nucleotide may be methylated to form 5-methylcytosine"
ggtgatacgcctgccttagcctcccaaagtgctgggattagaggtgtgaatgaccgcacccggcctagatgccattatgtttcaaattcttaagacacctgtattaagaatgaatagacagc

SEQ ID NO: 11398 - DNA, 122 bp, Homo sapiens
  misc_feature (61)..(62): /note="This region represents a CpG dinucleotide"
  misc_feature (61)..(61): /note="Nucleotide may be methylated to form 5-methylcytosine"
gctctgtggtgttggacaccttatttagcttcttgaagtctcagctccctatctggcagccgatacttccctgtaaggattaaagtgagacagtgaataaaagggtttagcttattgcctgg

SEQ ID NO: 11399 - DNA, 122 bp, Homo sapiens
  misc_feature (61)..(62): /note="This region represents a CpG dinucleotide"
  misc_feature (61)..(61): /note="Nucleotide may be methylated to form 5-methylcytosine"
agcaaggataggagagggatcaccaccataggccacatgtttgttaggttatttcacatgcgtccattcaactccattctacaaatagcaagagccaacaatgccaggaatcgcaaacaaga

SEQ ID NO: 11400 - DNA, 122 bp, Homo sapiens
  misc_feature (61)..(62): /note="This region represents a CpG dinucleotide"
  misc_feature (61)..(61): /note="Nucleotide may be methylated to form 5-methylcytosine"
ggagaggcagagtgtccttcagtcttgacgcctgggagctgtggatgcctcattgttgctcgtcttgcgacataaaataacagcatgctagtggccaaaaggcatgaagtgttcaaacttat

SEQ ID NO: 11401 - DNA, 122 bp, Homo sapiens
  misc_feature (61)..(62): /note="This region represents a CpG dinucleotide"
  misc_feature (61)..(61): /note="Nucleotide may be methylated to form 5-methylcytosine"
gagaaggggtagagaaaatcttccctttactcaaacaagtcagctatcaaatgtgctttccgagttgatctgttgaatgagcctaattggtggcatccacatcaatattagagaatgtttgc

SEQ ID NO: 11402 - DNA, 122 bp, Homo sapiens
  misc_feature (61)..(62): /note="This region represents a CpG dinucleotide"
  misc_feature (61)..(61): /note="Nucleotide may be methylated to form 5-methylcytosine"
ggattataggcatgagccaccatgcccacccccagtctctttcaatgattaataataatacggttatgaggacaattactgatgtaggtgttgaccattggcattatgctaagcacttcatg

SEQ ID NO: 11403 - DNA, 122 bp, Homo sapiens
  misc_feature (61)..(62): /note="This region represents a CpG dinucleotide"
  misc_feature (61)..(61): /note="Nucleotide may be methylated to form 5-methylcytosine"
aagttttgtattttttagtaaacctgaagtttcatcatgttgctcaggttcgtctcagaacgcctgggctcaagtgatccatctaccttggcctcccaaagtgctgggattacaggcgtgag

SEQ ID NO: 11404 - DNA, 122 bp, Homo sapiens
  misc_feature (61)..(62): /note="This region represents a CpG dinucleotide"
  misc_feature (61)..(61): /note="Nucleotide may be methylated to form 5-methylcytosine"
aaaaatcatttagaaattgcatttttaaagtatgccttggtttcaccattgggtagcagacggataagtgtaactgaaagacaagaaaagtggccccaactaaccagaagaaaagcttacag

SEQ ID NO: 11405 - DNA, 122 bp, Homo sapiens
  misc_feature (61)..(62): /note="This region represents a CpG dinucleotide"
  misc_feature (61)..(61): /note="Nucleotide may be methylated to form 5-methylcytosine"
ggtgtgggaaacttgagaggagagccttgcgcagcttcttctgtttacctggtgttggaccgagcatcagcttgctctctaccacactaggaggtagggcggtgggggtttttaactcccca

SEQ ID NO: 11406 - DNA, 122 bp, Homo sapiens
  misc_feature (61)..(62): /note="This region represents a CpG dinucleotide"
  misc_feature (61)..(61): /note="Nucleotide may be methylated to form 5-methylcytosine"
ggagtggtgtgaaatctgctccaggatgtgtcacagccagctggggacccaactgctaaacgggatttgaatgaactcaacccagacgaggctggatttgccagtcatgccactctccatct

SEQ ID NO: 11407 - DNA, 122 bp, Homo sapiens
  misc_feature (61)..(62): /note="This region represents a CpG dinucleotide"
  misc_feature (61)..(61): /note="Nucleotide may be methylated to form 5-methylcytosine"
tattgagccgtggcttgtcatcttgttgaagtggcttccagcctggagagtcatcatctccgtcatcaccctcatgtttggcactatttattgagtgcttaccatatgccaagcactgtgtc

SEQ ID NO: 11408 - DNA, 122 bp, Homo sapiens
  misc_feature (61)..(62): /note="This region represents a CpG dinucleotide"
  misc_feature (61)..(61): /note="Nucleotide may be methylated to form 5-methylcytosine"
cattttccattcacttgctcattccacaattatttttagtgccaattatatgcaaagcaacgtggtaggtcctgtgaatgcagcaaacaatacaggcacagtctctgccttcaggttgttta

SEQ ID NO: 11409 - DNA, 122 bp, Homo sapiens
  misc_feature (61)..(62): /note="This region represents a CpG dinucleotide"
  misc_feature (61)..(61): /note="Nucleotide may be methylated to form 5-methylcytosine"
gctttgtcacccaggctggggtgagtggcctcattgcagctgactgcagcctcaatttctcgtgcccaagccatccaaagttctttgttctattatgtggacagacacgaagggcatggcat

SEQ ID NO: 11410 - DNA, 122 bp, Homo sapiens
  misc_feature (61)..(62): /note="This region represents a CpG dinucleotide"
  misc_feature (61)..(61): /note="Nucleotide may be methylated to form 5-methylcytosine"
ccagagtgaacttctgtcatcatcacagagcctgtaatcttctgtatggctcagaggacccgccatgatttgtccctacttgcttctccagcctcctgtctcacttctctcctatccctggg

SEQ ID NO: 11411 - DNA, 122 bp, Homo sapiens
  misc_feature (61)..(62): /note="This region represents a CpG dinucleotide"
  misc_feature (61)..(61): /note="Nucleotide may be methylated to form 5-methylcytosine"
tggagctcccagtcaagtggctgacattcaattccagctgagctccttattattctctctcgtcattcttgtgagtcatgttcccaatttgatttgagcagtaggaaggctgcgtgtgccac

SEQ ID NO: 11412 - DNA, 122 bp, Homo sapiens
  misc_feature (61)..(62): /note="This region represents a CpG dinucleotide"
  misc_feature (61)..(61): /note="Nucleotide may be methylated to form 5-methylcytosine"
ggaatgcaccaattcgctccagtcatttagctaagtcttagtcattttcaagacctagagcgtatcttaacttcctgatccctttagccagaaatgactgaagccctaagcacatatggtcc

SEQ ID NO: 11413 - DNA, 122 bp, Homo sapiens
  misc_feature (61)..(62): /note="This region represents a CpG dinucleotide"
  misc_feature (61)..(61): /note="Nucleotide may be methylated to form 5-methylcytosine"
tggctccagtgcttcaggcgtgaaagtgcaccctccagggagtccccgttagtaccaggacggttgggagggaagggctgctgaggacaagttccacttgtctgatgaggctacagccgaca

SEQ ID NO: 11414 - DNA, 122 bp, Homo sapiens
  misc_feature (61)..(62): /note="This region represents a CpG dinucleotide"
  misc_feature (61)..(61): /note="Nucleotide may be methylated to form 5-methylcytosine"
gaagtgtacattaattactgcagattgtctcctatgcatctccccccaccccctctgcatcgcagacagcagtgctcaaaagggtccgcaaaataaaaatgtgtcgggtaattaaatgggta

SEQ ID NO: 11415 - DNA, 122 bp, Homo sapiens
  misc_feature (61)..(62): /note="This region represents a CpG dinucleotide"
  misc_feature (61)..(61): /note="Nucleotide may be methylated to form 5-methylcytosine"
catgcttatctcacccaagctccaaataagtatctcttctgtcatctacatatagttgtccggtcctgagcaaactggacaggaaggggtgggtggggctggggggagctgagcatcctcac

SEQ ID NO: 11416 - DNA, 122 bp, Homo sapiens
  misc_feature (61)..(62): /note="This region represents a CpG dinucleotide"
  misc_feature (61)..(61): /note="Nucleotide may be methylated to form 5-methylcytosine"
gcaggacgaggccaggaggctttggttcgacacagttgatccagaagttggcacagctggcgtgatactggtgccctccataggccagcttgaaactgtctgtttctgagttgaatgcctgc

SEQ ID NO: 11417 - DNA, 122 bp, Homo sapiens
  misc_feature (61)..(62): /note="This region represents a CpG dinucleotide"
  misc_feature (61)..(61): /note="Nucleotide may be methylated to form 5-methylcytosine"
aaaagaacaacacaggtttataatatagtcaatatagaaagatttggtctattatgaagtcgcttgagatgatttcattgttagatctgtttgtttaggaattagctaaatcagtcaatcct

SEQ ID NO: 11418 - DNA, 122 bp, Homo sapiens
  misc_feature (61)..(62): /note="This region represents a CpG dinucleotide"
  misc_feature (61)..(61): /note="Nucleotide may be methylated to form 5-methylcytosine"
taaatccagatgacacactcctctgaaggcctggagatcatgtggttggtgagaggagagcgctaagaacaggcttggctcagaggaggatgctgctggataaggtgttattatctatttga

SEQ ID NO: 11419 - DNA, 122 bp, Homo sapiens
  misc_feature (61)..(62): /note="This region represents a CpG dinucleotide"
  misc_feature (61)..(61): /note="Nucleotide may be methylated to form 5-methylcytosine"
atggctttaaatttacaagtgaagactcatccatcatcaaagacccagaatgctcactgccgtcacattaaaaataacttacaaaagatatgttttcatttgtgtatcatccccttcaacac

SEQ ID NO: 11420 - DNA, 122 bp, Homo sapiens
  misc_feature (61)..(62): /note="This region represents a CpG dinucleotide"
  misc_feature (61)..(61): /note="Nucleotide may be methylated to form 5-methylcytosine"
ctctgtattttctaggtgtgcagtggttttctagttgaacagaaaaatgctagtacgtaacgaatgaatccatccattgttggaaggatgatgatgttacgattatagaaaaaatccttatt

SEQ ID NO: 11421 - DNA, 122 bp, Homo sapiens
  misc_feature (61)..(62): /note="This region represents a CpG dinucleotide"
  misc_feature (61)..(61): /note="Nucleotide may be methylated to form 5-methylcytosine"
cacacttaggaaacacaaaagatcaagccttaccagttttgacatccagagacgggaggccgggctgtgcacttgctaacatgctgtgtcagcgagaagtcaaatgatgtacgtggaactgg

SEQ ID NO: 11422 - DNA, 122 bp, Homo sapiens
  misc_feature (61)..(62): /note="This region represents a CpG dinucleotide"
  misc_feature (61)..(61): /note="Nucleotide may be methylated to form 5-methylcytosine"
aggaatgacacatgtctaaactatgtttcagtgagcaattcccaaactgatttgaccatgcgtttcctttacaaacctataagttccaggaaacaatgctgagaagtgttattttattatcc

SEQ ID NO: 11423 - DNA, 122 bp, Homo sapiens
  misc_feature (61)..(62): /note="This region represents a CpG dinucleotide"
  misc_feature (61)..(61): /note="Nucleotide may be methylated to form 5-methylcytosine"
aggtagcatatatagtgtggatactctggacagaatggatgattcacgtcctgggcggaacggagcaagagggtgagatttcatcatgaattcagaatggcacttagtttagaacttatgaa

SEQ ID NO: 11424 - DNA, 122 bp, Homo sapiens
  misc_feature (61)..(62): /note="This region represents a CpG dinucleotide"
  misc_feature (61)..(61): /note="Nucleotide may be methylated to form 5-methylcytosine"
gactgacttccctgaggagagactgccttctaatggcgtgaccatctgctccacttccttcgtgtttggtcagtgaatcacggcaagtcacaggccacctgagcattctactcacttctttt

SEQ ID NO: 11425 - DNA, 122 bp, Homo sapiens
  misc_feature (61)..(62): /note="This region represents a CpG dinucleotide"
  misc_feature (61)..(61): /note="Nucleotide may be methylated to form 5-methylcytosine"
acacacacacccagaggcaccctgtgggagtccctcttaagctctccccactggctcattcgctactgatgacttgtggacccagacactttcatcactctcaaccagtcttttatgtgtga

SEQ ID NO: 11426 - DNA, 122 bp, Homo sapiens
  misc_feature (61)..(62): /note="This region represents a CpG dinucleotide"
  misc_feature (61)..(61): /note="Nucleotide may be methylated to form 5-methylcytosine"
atacagatgagaaatcaagcacagagaggttaaatcactcatcaaagcttagacagtaagcgctggggctggtcttgaaacccaagtgccctggccctggagcacatgcccttagccactgt

SEQ ID NO: 11427 - DNA, 122 bp, Homo sapiens
  misc_feature (61)..(62): /note="This region represents a CpG dinucleotide"
  misc_feature (61)..(61): /note="Nucleotide may be methylated to form 5-methylcytosine"
gacccttggctgggtccactctgcagactccacctgaggagacccacccagggtgaagctcggtgcccaggcctgaactgagcccggccgggtgcaagggctgaggtgtgaggtcggcccag

SEQ ID NO: 11428 - DNA, 122 bp, Homo sapiens
  misc_feature (61)..(62): /note="This region represents a CpG dinucleotide"
  misc_feature (61)..(61): /note="Nucleotide may be methylated to form 5-methylcytosine"
ttctctctttgcatcactgcccacagcagtggggcaggccaggccccattctggtggccacgttcaggctctcaaagcccagcctggggcagagtcccaaaccacctatggcctaggatgga

SEQ ID NO: 11429 - DNA, 122 bp, Homo sapiens
  misc_feature (61)..(62): /note="This region represents a CpG dinucleotide"
  misc_feature (61)..(61): /note="Nucleotide may be methylated to form 5-methylcytosine"
tctaattattccttacaaccattctatgggatgactattattattcccactttctggttgcggacactgagactgaaggagattaaggaaacctgcccaatgtcacttagcttttaagtagc

SEQ ID NO: 11430 - DNA, 122 bp, Homo sapiens
  misc_feature (61)..(62): /note="This region represents a CpG dinucleotide"
  misc_feature (61)..(61): /note="Nucleotide may be methylated to form 5-methylcytosine"
agtactcagtacagtcatgtgctgtacaggtttgtagcccaggatccacaggctataccacgtagcctaggtgtgtaggtgatacctacattgaagacttaaaggattcaggggtgaaagct

SEQ ID NO: 11431 - DNA, 122 bp, Homo sapiens
  misc_feature (61)..(62): /note="This region represents a CpG dinucleotide"
  misc_feature (61)..(61): /note="Nucleotide may be methylated to form 5-methylcytosine"
tcagttggcagtttagctggggctgactggttccagatgacctcactcaaatgcctgacacgtgtcttggtgttggctgcagtgatgagatgactggactatgtttccctcctcatcaagaa

SEQ ID NO: 11432 - DNA, 122 bp, Homo sapiens
  misc_feature (61)..(62): /note="This region represents a CpG dinucleotide"
  misc_feature (61)..(61): /note="Nucleotide may be methylated to form 5-methylcytosine"
atttattgaggagctgccttgtgctatatacggatggtatggtggtagggcctgctttcacggacttagatttaagcaggggagaagtctagtaggaaacatatacctgagtgtctcatcat

SEQ ID NO: 11433 - DNA, 122 bp, Homo sapiens
  misc_feature (61)..(62): /note="This region represents a CpG dinucleotide"
  misc_feature (61)..(61): /note="Nucleotide may be methylated to form 5-methylcytosine"
aagttaaggcatttttaatcacaagaagagatagaaggtcagcaaaagatacaggtcatacggaccttgcagataaaacaggttgcagtaaagacgttggctaaatcccactaaaaccaaga

SEQ ID NO: 11434 - DNA, 122 bp, Homo sapiens
  misc_feature (61)..(62): /note="This region represents a CpG dinucleotide"
  misc_feature (61)..(61): /note="Nucleotide may be methylated to form 5-methylcytosine"
agtcattacagttcctcctcctcccattaaaatgggagcatacagaggttagaaagtaaacgtagttctaatcaaagtttggcttacagcagatctcctgggcctgcaggttatctgcctaa

SEQ ID NO: 11435 - DNA, 122 bp, Homo sapiens
  misc_feature (61)..(62): /note="This region represents a CpG dinucleotide"
  misc_feature (61)..(61): /note="Nucleotide may be methylated to form 5-methylcytosine"
gtgcatttggagccagtgcagtaagaggtggggtccccagagtttcctgccaagagtctgcgacatttgtgtgtgtttcactaggtttcataacggctcactcctggaggtcattgctgcgc

SEQ ID NO: 11436 - DNA, 122 bp, Homo sapiens
  misc_feature (61)..(62): /note="This region represents a CpG dinucleotide"
  misc_feature (61)..(61): /note="Nucleotide may be methylated to form 5-methylcytosine"
ccatgtccatgttttcacgtgaatgggaaaagagtgggaagagaataagaggtatgctggcgataacaggataggcccaatagagagccctgagatcaggaatctgaacagacttgcagggt

SEQ ID NO: 11437 - DNA, 122 bp, Homo sapiens
  misc_feature (61)..(62): /note="This region represents a CpG dinucleotide"
  misc_feature (61)..(61): /note="Nucleotide may be methylated to form 5-methylcytosine"
aggtactcagtcttttctttccttctaataagtaggtgagtattttccttggtttgcacacgaggaaatggaggctcagagagcttaggtagcttactcaaagccacacagctgggttaaat

SEQ ID NO: 11438 - DNA, 122 bp, Homo sapiens
  misc_feature (61)..(62): /note="This region represents a CpG dinucleotide"
  misc_feature (61)..(61): /note="Nucleotide may be methylated to form 5-methylcytosine"
agagccaagagatggagtcacattcccagccacacccatcatctgagccccagcagtgagcggagaaaccagatctccctggactctgcagtgatgtgtgctaataaattctcttcttttgc

SEQ ID NO: 11439 - DNA, 122 bp, Homo sapiens
  misc_feature (61)..(62): /note="This region represents a CpG dinucleotide"
  misc_feature (61)..(61): /note="Nucleotide may be methylated to form 5-methylcytosine"
atttattgtagaaaataacttcacattgctctgcactgtaaaaaacctttgacatacattcgcattttatttaacatttcataacatcactttgaagtttgcagacctgatgtttgtttttg

SEQ ID NO: 11440 - DNA, 122 bp, Homo sapiens
  misc_feature (61)..(62): /note="This region represents a CpG dinucleotide"
  misc_feature (61)..(61): /note="Nucleotide may be methylated to form 5-methylcytosine"
cactctgcctttggggatgagaacgtgtaccatactcatattacatatacagattcaggccgggcacggtggctcatgcctgtaatcccagcactttgggaggctgaggcgggtggatcact

SEQ ID NO: 11441 - DNA, 122 bp, Homo sapiens
  misc_feature (61)..(62): /note="This region represents a CpG dinucleotide"
  misc_feature (61)..(61): /note="Nucleotide may be methylated to form 5-methylcytosine"
ggaaagttaacctggtattagcaaggagaaggagtaggatttacaaatagataagtgcaacggtatgtgggagtgtcagaaaagcatcacagtacttcagcacatctacttgggcaatctca

SEQ ID NO: 11442 - DNA, 122 bp, Homo sapiens
  misc_feature (61)..(62): /note="This region represents a CpG dinucleotide"
  misc_feature (61)..(61): /note="Nucleotide may be methylated to form 5-methylcytosine"
tggatgatgtaagctgtacgcaagactgtcagaggccaactactccaaaactttcttcctcgtaaataactggaagtcaggatgaactggctcggcaaagactccctcaccatatctgacct

SEQ ID NO: 11443 - DNA, 122 bp, Homo sapiens
  misc_feature (61)..(62): /note="This region represents a CpG dinucleotide"
  misc_feature (61)..(61): /note="Nucleotide may be methylated to form 5-methylcytosine"
caacacagagaactgacagcttcaatggggacaatgcccagactaaacctttaaggaacccgtcatatgtatcacgaagtgacacatgcttaggagggacagaggagggcgagggagtgcag

SEQ ID NO: 11444 - DNA, 122 bp, Homo sapiens
  misc_feature (61)..(62): /note="This region represents a CpG dinucleotide"
  misc_feature (61)..(61): /note="Nucleotide may be methylated to form 5-methylcytosine"
ctctctgcctttccctctaatctgccttgaagccagcagttatcacctggatgcaccagacggaggatgctgacatgtgagatgctgtccccccaccgggagtgggagactcagtgaggctc

SEQ ID NO: 11445 - DNA, 122 bp, Homo sapiens
  misc_feature (61)..(62): /note="This region represents a CpG dinucleotide"
  misc_feature (61)..(61): /note="Nucleotide may be methylated to form 5-methylcytosine"
gccctgtggcaggaatgattcagagcccaggtcagactctaggaggtctggctcttgggacgcatgaagaatagcacccacgcacctgagacaggtgcaggtctatgtatgtttcagcctcc

SEQ ID NO: 11446 - DNA, 122 bp, Homo sapiens
  misc_feature (61)..(62): /note="This region represents a CpG dinucleotide"
  misc_feature (61)..(61): /note="Nucleotide may be methylated to form 5-methylcytosine"
ctgacctagcagtcaacatgaaggctctcattgttctggggcttgtcctcctttctgttacggtccagggcaaggtctttgaaaggtgtgagttggccagaactctgaaaagattgggaatg

SEQ ID NO: 11447 - DNA, 122 bp, Homo sapiens
  misc_feature (61)..(62): /note="This region represents a CpG dinucleotide"
  misc_feature (61)..(61): /note="Nucleotide may be methylated to form 5-methylcytosine"
cagcttgagacagatggaaacaagagaagaaacagtggagtggtaacggaagtgttgacacgactccagatattaggcaagaaggctgtgatcaagtaacagagaattaatttcagttgtgt

SEQ ID NO: 11448 - DNA, 122 bp, Homo sapiens
  misc_feature (61)..(62): /note="This region represents a CpG dinucleotide"
  misc_feature (61)..(61): /note="Nucleotide may be methylated to form 5-methylcytosine"
ataaattacatttatttctgttatgaagtgcctattgtgcaacacattaaattgattttacgtcctgctaatagggcagaacactactgtaggccatgccaatgatacatcttttttgtttg

SEQ ID NO: 11449 - DNA, 122 bp, Homo sapiens
  misc_feature (61)..(62): /note="This region represents a CpG dinucleotide"
  misc_feature (61)..(61): /note="Nucleotide may be methylated to form 5-methylcytosine"
ggtattttcaaattaggcaccttctaaatttgactcatacattatggaaatctgatgacacgaggggtggataggcttgctttgattttatgaaatattaatcatagctgtgattaatgatt

SEQ ID NO: 11450 - DNA, 122 bp, Homo sapiens
  misc_feature (61)..(62): /note="This region represents a CpG dinucleotide"
  misc_feature (61)..(61): /note="Nucleotide may be methylated to form 5-methylcytosine"
ccggccaagattattttaaaaggcatgacacactgtctctcgtgctccaccatggtaagacgtgcttgcttccccttcaccttccgctatgattgtaagtttcctgaggcctcctagtcatg

SEQ ID NO: 11451 - DNA, 122 bp, Homo sapiens
  misc_feature (61)..(62): /note="This region represents a CpG dinucleotide"
  misc_feature (61)..(61): /note="Nucleotide may be methylated to form 5-methylcytosine"
ttcagggacagctcaagtatggggcaataactgaacccatcaccaggagcaacttgctgccgtgtggtcttgcgggggcaccacagtgagccccacctcggggtggctcatcacacacagtc

SEQ ID NO: 11452 - DNA, 122 bp, Homo sapiens
  misc_feature (61)..(62): /note="This region represents a CpG dinucleotide"
  misc_feature (61)..(61): /note="Nucleotide may be methylated to form 5-methylcytosine"
cactcacacacacaaacacacacacaatttgggggcagaatgtcaggccagagcaatagccggctggcacactaagcttcacaggacactttaagaaccaggattaaatgagatcctgcatt

SEQ ID NO: 11453 - DNA, 122 bp, Homo sapiens
  misc_feature (61)..(62): /note="This region represents a CpG dinucleotide"
  misc_feature (61)..(61): /note="Nucleotide may be methylated to form 5-methylcytosine"
ccaggtcagaggtggcaacctgtacatggatgacacactgggggactgggcctcgccctgcggggggacctgggtgggtgggaatgccagctgcccggccagaatcccacgagactggtcag

SEQ ID NO: 11454 - DNA, 122 bp, Homo sapiens
  misc_feature (61)..(62): /note="This region represents a CpG dinucleotide"
  misc_feature (61)..(61): /note="Nucleotide may be methylated to form 5-methylcytosine"
acccaccctgggttcctcgtagtgaacacgtcattcgaacttggtatcttgttactctcacgtctcacttgagcttcacttggcgatgataagaaggcctggtttttaggcttgcagtggcc

SEQ ID NO: 11455 - DNA, 122 bp, Homo sapiens
  misc_feature (61)..(62): /note="This region represents a CpG dinucleotide"
  misc_feature (61)..(61): /note="Nucleotide may be methylated to form 5-methylcytosine"
tgtggcagagagttaatgcatgagacaaaactgacctgggatcacaagtggacatcctcacgctcatgatcacagaccacagtgttacattagaaaaactacgggagaagcaagtgcagaga

SEQ ID NO: 11456 - DNA, 122 bp, Homo sapiens
  misc_feature (61)..(62): /note="This region represents a CpG dinucleotide"
  misc_feature (61)..(61): /note="Nucleotide may be methylated to form 5-methylcytosine"
ttgggatcccatggagcccaactcccttgtactaggggcaagaaaactgagtctcagagacggtgagtgatttgtttgagatcacacagcacaactcaagctgcttagccacaatgagacaa

SEQ ID NO: 11457 - DNA, 122 bp, Homo sapiens
  misc_feature (61)..(62): /note="This region represents a CpG dinucleotide"
  misc_feature (61)..(61): /note="Nucleotide may be methylated to form 5-methylcytosine"
ataagattgccacatgctatctaaatattacatggccatttaaggagtgcttttctgcatcgttaactggaatagagaaactgggttgaagtcctggtttggctggtaacttgatgacacac

SEQ ID NO: 11458 - DNA, 122 bp, Homo sapiens
  misc_feature (61)..(62): /note="This region represents a CpG dinucleotide"
  misc_feature (61)..(61): /note="Nucleotide may be methylated to form 5-methylcytosine"
ccatcccagggatgtaaaagaactcaacagttgctcagaataccccttttaccatctcaacgacatgggcaatcaaggactgccttgcttcctgccgggttcctgagtgaatcagtgggcat

SEQ ID NO: 11459 - DNA, 122 bp, Homo sapiens
  misc_feature (61)..(62): /note="This region represents a CpG dinucleotide"
  misc_feature (61)..(61): /note="Nucleotide may be methylated to form 5-methylcytosine"
cttgggagctctagaggcctgattcatcctttctctaagcccttcatatgaaactatgtccggcaaagtctcagactcacccaacccttcccatgtccacattcacagctaacaggagccac

SEQ ID NO: 11460 - DNA, 122 bp, Homo sapiens
  misc_feature (61)..(62): /note="This region represents a CpG dinucleotide"
  misc_feature (61)..(61): /note="Nucleotide may be methylated to form 5-methylcytosine"
ccagggcatatgatttctagggtgtctcccagctctgataggtgaggactcatcatttcacgtgcatcttcattaactcctaactcaacccttctaagctgtcctgccatcaagaaagtgat

SEQ ID NO: 11461 - DNA, 122 bp, Homo sapiens
  misc_feature (61)..(62): /note="This region represents a CpG dinucleotide"
  misc_feature (61)..(61): /note="Nucleotide may be methylated to form 5-methylcytosine"
cggcccagagccaatctcctggcattggctcctcctccctagagaaaggcagagcaggcccggtccggtggctcacacccggaatccagcacattgggagttcaaaaacagcctaggcaata

SEQ ID NO: 11462 - DNA, 122 bp, Homo sapiens
  misc_feature (61)..(62): /note="This region represents a CpG dinucleotide"
  misc_feature (61)..(61): /note="Nucleotide may be methylated to form 5-methylcytosine"
agtctcaagaaagccagcagaattctcaatccctgagatgcattcattggcctttggtgtcgtgtacaccctgtgactaccatcatcacatcagaaaatacagctggatgactaattcctta

SEQ ID NO: 11463 - DNA, 122 bp, Homo sapiens
  misc_feature (61)..(62): /note="This region represents a CpG dinucleotide"
  misc_feature (61)..(61): /note="Nucleotide may be methylated to form 5-methylcytosine"
agagacttacaaagcggctggaattgttgttgcgcacagtcttggcgttgccgaaggcctcgagcagcgggttggactgcaggatgatatctttgacgtgctggggcagaggcaggtggagt

SEQ ID NO: 11464 - DNA, 122 bp, Homo sapiens
  misc_feature (61)..(62): /note="This region represents a CpG dinucleotide"
  misc_feature (61)..(61): /note="Nucleotide may be methylated to form 5-methylcytosine"
cgagtgtttctctccatcatcttggctgtgtcctcggaacctagacccagatgtggcatacgctaggtgctcagcacttgctcagagcagtcacaactctgcaggtgataagggtggtggca

SEQ ID NO: 11465 - DNA, 122 bp, Homo sapiens
  misc_feature (61)..(62): /note="This region represents a CpG dinucleotide"
  misc_feature (61)..(61): /note="Nucleotide may be methylated to form 5-methylcytosine"
cacttactaatacaatggtcacaatcctgtctctgggcctcagttaccaaacctgtgaaacgagagggttggttggggccatctctaagaccatttccagtgagtcaatccatgatgtactg

SEQ ID NO: 11466 - DNA, 122 bp, Homo sapiens
  misc_feature (61)..(62): /note="This region represents a CpG dinucleotide"
  misc_feature (61)..(61): /note="Nucleotide may be methylated to form 5-methylcytosine"
gcacgctctggagagaaagccaagggtgtagttggacaccttttaactaaagagattaggcgtgtgactcatggatccactcagtcgtctcagtggaagccaagaatcaagatgagattatc

SEQ ID NO: 11467 - DNA, 122 bp, Homo sapiens
  misc_feature (61)..(62): /note="This region represents a CpG dinucleotide"
  misc_feature (61)..(61): /note="Nucleotide may be methylated to form 5-methylcytosine"
aaagcaatgacttagcattttgggattggcacaaaagtaggaaaacacagcaaagggaatcgcagcctgtctggctattggctgagtcttgcttctgaggattaaattgtcttatgaacttg

SEQ ID NO: 11468 - DNA, 122 bp, Homo sapiens
  misc_feature (61)..(62): /note="This region represents a CpG dinucleotide"
  misc_feature (61)..(61): /note="Nucleotide may be methylated to form 5-methylcytosine"
gtgctaggccctgtgccaggtggtgattatgggccctattctcaaaggactcctggtctccgtctgtcacttactttagaaacaagtcatctagccagagccagaagggcactggagatcac

SEQ ID NO: 11469 - DNA, 122 bp, Homo sapiens
  misc_feature (61)..(62): /note="This region represents a CpG dinucleotide"
  misc_feature (61)..(61): /note="Nucleotide may be methylated to form 5-methylcytosine"
ccatgcatttgtttcttttaatatggcaccatgtggaagtgtagttttgctcaactcatacgtgtgtgaaagaaagcatagtgaatatgactaagtgcataggcccaggaaccagatgacct

SEQ ID NO: 11470 - DNA, 122 bp, Homo sapiens
  misc_feature (61)..(62): /note="This region represents a CpG dinucleotide"
  misc_feature (61)..(61): /note="Nucleotide may be methylated to form 5-methylcytosine"
ctcctgaccagaaagttctttccattccatttctttccaggcttatctgaagcctgctggcgcatggcagttgtgcatcaaactgtccccaagctcaaggccagaggaagagcaggttggga

SEQ ID NO: 11471 - DNA, 122 bp, Homo sapiens
  misc_feature (61)..(62): /note="This region represents a CpG dinucleotide"
  misc_feature (61)..(61): /note="Nucleotide may be methylated to form 5-methylcytosine"
atgttagttcatttttcttacttattgttttcccttgatttttaacttactaaagtacagcgagatgactaggttagtgaagaaaatgcattcgatggccagtctgcattccagcagccaca

SEQ ID NO: 11472 - DNA, 122 bp, Homo sapiens
  misc_feature (61)..(62): /note="This region represents a CpG dinucleotide"
  misc_feature (61)..(61): /note="Nucleotide may be methylated to form 5-methylcytosine"
gacgtcacactgaccacaaaagcttatatttcctgctactaaatacacagcccctgctgacgaagtgatcattacagagagagcttgttctgccgaggtcaccccaaagtggggatgaaggc

SEQ ID NO: 11473 - DNA, 122 bp, Homo sapiens
  misc_feature (61)..(62): /note="This region represents a CpG dinucleotide"
  misc_feature (61)..(61): /note="Nucleotide may be methylated to form 5-methylcytosine"
cttgtccttgtccttgggataacctccttaatgtgcctgacaaagctctgtctctgttggcgtctgctaatttctccagccccatctgttggcactgctccctcagcccatgccaatattat

SEQ ID NO: 11474 - DNA, 122 bp, Homo sapiens
  misc_feature (61)..(62): /note="This region represents a CpG dinucleotide"
  misc_feature (61)..(61): /note="Nucleotide may be methylated to form 5-methylcytosine"
atctcatgatccgcccacctcggccttccagagtgctgggattacaggtgtgagccactgcgcccggtcaagacatgttttgttaagtctctgtcacctgaaaaatgtgcatgtccttctgg

SEQ ID NO: 11475 - DNA, 122 bp, Homo sapiens
  misc_feature (61)..(62): /note="This region represents a CpG dinucleotide"
  misc_feature (61)..(61): /note="Nucleotide may be methylated to form 5-methylcytosine"
aaaataactccttccttttagttatagttattagtataatatagtaattatatttggccacgcccaacatgtagagtgattgacttgggtgttgaccttagatttccttgggtggctactga

SEQ ID NO: 11476 - DNA, 122 bp, Homo sapiens
  misc_feature (61)..(62): /note="This region represents a CpG dinucleotide"
  misc_feature (61)..(61): /note="Nucleotide may be methylated to form 5-methylcytosine"
caatgcatatggagactaactggtaacacacctatgatctgactatcaaagtcttagtcacgccaccagatagcaacttccttgcttcataagctttagcatgtcttccttcacagaaacaa

SEQ ID NO: 11477 - DNA, 122 bp, Homo sapiens
  misc_feature (61)..(62): /note="This region represents a CpG dinucleotide"
  misc_feature (61)..(61): /note="Nucleotide may be methylated to form 5-methylcytosine"
gtcattccttccttgtactctgcatgtcagctaaattgcattactcactactgcctgtcacgcatacatcattacagatttctctggattcatttattacgacaattgtggttacaacatcc

SEQ ID NO: 11478 - DNA, 122 bp, Homo sapiens
  misc_feature (61)..(62): /note="This region represents a CpG dinucleotide"
  misc_feature (61)..(61): /note="Nucleotide may be methylated to form 5-methylcytosine"
agatggaaacccagatttcctacctggtgttctgcatagataacaccaaccaggtgtagacgcggcaaagacacctggagccctctcaaagccagctggggttctgtacataggtctgtgac

SEQ ID NO: 11479 - DNA, 122 bp, Homo sapiens
  misc_feature (61)..(62): /note="This region represents a CpG dinucleotide"
  misc_feature (61)..(61): /note="Nucleotide may be methylated to form 5-methylcytosine"
tccctaacttccagtattcacattcttatgtgattccctcccttgagtatgggcacgactcgtgaattgcttctaacaaatagagtattgcaaaaatgacagaatgtcacttcctggattat

SEQ ID NO: 11480 - DNA, 122 bp, Homo sapiens
  misc_feature (61)..(62): /note="This region represents a CpG dinucleotide"
  misc_feature (61)..(61): /note="Nucleotide may be methylated to form 5-methylcytosine"
aatgagtgtgtccattcagtggcaggctatgttcctgagcaagcctgccaggcagattttcggatcctctggagtgtgcgcctgcttaacttgctatatactattgattacgatattttaca

SEQ ID NO: 11481 - DNA, 122 bp, Homo sapiens
  misc_feature (61)..(62): /note="This region represents a CpG dinucleotide"
  misc_feature (61)..(61): /note="Nucleotide may be methylated to form 5-methylcytosine"
tcttaattgattactgtctggttacaaactggcaaactgactaaaatgggaagctgccaccgtgcctgactcatgtagctgatgaccgaaggctcatcctttcttttctatttgacagacat

SEQ ID NO: 11482 - DNA, 122 bp, Homo sapiens
  misc_feature (61)..(62): /note="This region represents a CpG dinucleotide"
  misc_feature (61)..(61): /note="Nucleotide may be methylated to form 5-methylcytosine"
cctcaatgatctagtgaggtaagtagagtgaagatgatgattaaccccatgggttgcccacgtttacacaagataatgacagagctaagacttcctctgatcttctggttattcaggtctct

SEQ ID NO: 11483 - DNA, 122 bp, Homo sapiens
  misc_feature (61)..(62): /note="This region represents a CpG dinucleotide"
  misc_feature (61)..(61): /note="Nucleotide may be methylated to form 5-methylcytosine"
agaaatcttctctgtcatccacagacctttgtcatacacacataccttgatactactccccgcttgcactcccagatggtgggaacagggcacacccatgcctgcagccatacctgcactgg

SEQ ID NO: 11484 - DNA, 122 bp, Homo sapiens
  misc_feature (61)..(62): /note="This region represents a CpG dinucleotide"
  misc_feature (61)..(61): /note="Nucleotide may be methylated to form 5-methylcytosine"
aaagtctgtgagtaatcactgaagtgtacctacaggtaagttttgacttcactgcaaacccggagaagcatgagttctgaccctactgttgattaccagctacaaacatgttgtcatgtact

SEQ ID NO: 11485 - DNA, 122 bp, Homo sapiens
  misc_feature (61)..(62): /note="This region represents a CpG dinucleotide"
  misc_feature (61)..(61): /note="Nucleotide may be methylated to form 5-methylcytosine"
gttcagcaagtactggcagcacttaacacgtgcagtaaagcagtgaggctgttttgccaccgtgacaatgcagttgagttttgcctaacgtgaaaatactaagtttctgtgtattctctgct

SEQ ID NO: 11486 - DNA, 122 bp, Homo sapiens
  misc_feature (61)..(62): /note="This region represents a CpG dinucleotide"
  misc_feature (61)..(61): /note="Nucleotide may be methylated to form 5-methylcytosine"
atgggtggctggcacctcatttgaattcatctttgccatgttccctttcaaatgtttcatcgaaacagtgcacctgcagcgtctatcttctttaatctggagtcctttgaagaaaatgtcag

SEQ ID NO: 11487 - DNA, 122 bp, Homo sapiens
  misc_feature (61)..(62): /note="This region represents a CpG dinucleotide"
  misc_feature (61)..(61): /note="Nucleotide may be methylated to form 5-methylcytosine"
gcacagctagtcagtgtgaaaccgactcagaacccacagctggctgggtgtggtggctcacgcctgtaatcccagcactttgggaagctgaggcgggcagattgcttaagctcaggagtttg

SEQ ID NO: 11488 - DNA, 122 bp, Homo sapiens
  misc_feature (61)..(62): /note="This region represents a CpG dinucleotide"
  misc_feature (61)..(61): /note="Nucleotide may be methylated to form 5-methylcytosine"
tacactgaacaccagtgaatcgtctttaaaagcacccatccttgcctgtcaggttgagaacgtgtgctcccagctgaatcatgagggtttatggtatactctctctattccctggccaagat

SEQ ID NO: 11489 - DNA, 122 bp, Homo sapiens
  misc_feature (61)..(62): /note="This region represents a CpG dinucleotide"
  misc_feature (61)..(61): /note="Nucleotide may be methylated to form 5-methylcytosine"
ccttgcacacaggcttctggaacttctagttcctgttgtaggaatcctggagttgggtgacgggaagaatgcaactagagaggtttggggagatttttttttgtttttgagacaggatgtca

SEQ ID NO: 11490 - DNA, 122 bp, Homo sapiens
  misc_feature (61)..(62): /note="This region represents a CpG dinucleotide"
  misc_feature (61)..(61): /note="Nucleotide may be methylated to form 5-methylcytosine"
gccctccaagggtggtgctctgataagctgccccagcaactgggtataaaagcctgcaggcgtcaggtggcagcagccacaggcacccatgctccaggcgtgtctgtgacaggaaagctttc

SEQ ID NO: 11491 - DNA, 122 bp, Homo sapiens
  misc_feature (61)..(62): /note="This region represents a CpG dinucleotide"
  misc_feature (61)..(61): /note="Nucleotide may be methylated to form 5-methylcytosine"
gtaggccatggttgctaatacacagcacaggagaccaagaatatttctatagtgagtcatcggcttttgtatacctaattgattccttgtttcataacttccagatatctgaatttctacac

SEQ ID NO: 11492 - DNA, 122 bp, Homo sapiens
  misc_feature (61)..(62): /note="This region represents a CpG dinucleotide"
  misc_feature (61)..(61): /note="Nucleotide may be methylated to form 5-methylcytosine"
agtctcagctttctcaactgaagatgaggctaacgtcatccatggcagcgtaatgagggccggtggagcccagggtgaggtgcactggagaccttcaagaaacacttctttgagaagactgt

SEQ ID NO: 11493 - DNA, 122 bp, Homo sapiens
  misc_feature (61)..(62): /note="This region represents a CpG dinucleotide"
  misc_feature (61)..(61): /note="Nucleotide may be methylated to form 5-methylcytosine"
cagagagcagaccccctgcctggcatgggcctgctcaggccttgctccaacaccgaggcccgggccaagggcacctgcttggggataacctgactctaactcactgcactggtgacattttc

SEQ ID NO: 11494 - DNA, 122 bp, Homo sapiens
  misc_feature (61)..(62): /note="This region represents a CpG dinucleotide"
  misc_feature (61)..(61): /note="Nucleotide may be methylated to form 5-methylcytosine"
caagctctcacaggggttatgttactaaagcggttttatagcccttggcttgaaagggcacgggaaaagtaaataagcctctgcttgcttagagcacagccaaagctgattgtatttccctc

SEQ ID NO: 11495 - DNA, 122 bp, Homo sapiens
  misc_feature (61)..(62): /note="This region represents a CpG dinucleotide"
  misc_feature (61)..(61): /note="Nucleotide may be methylated to form 5-methylcytosine"
cagatgctgaggtcgtcatgattttattgaatcacacttcagttattttctctccactctcgttcttgcagctgtgttagtaatcattaagtcattttatgatcttgctggggttccacaca

SEQ ID NO: 11496 - DNA, 122 bp, Homo sapiens
  misc_feature (61)..(62): /note="This region represents a CpG dinucleotide"
  misc_feature (61)..(61): /note="Nucleotide may be methylated to form 5-methylcytosine"
gcttcgatctctccatctctataaaggcttccctgtctgtctatgttgatcttcagccatcgcttttttttctgaacttctgctcttcctcagtcagtggcatgatatgccatttcccaagg

SEQ ID NO: 11497 - DNA, 122 bp, Homo sapiens
  misc_feature (61)..(62): /note="This region represents a CpG dinucleotide"
  misc_feature (61)..(61): /note="Nucleotide may be methylated to form 5-methylcytosine"
aatgctgtgagacagtcacttgtctgcacagcttcctccaccaacaggagctccttgaggcgaggcacagtgtcttctgtgtccctggagccaagcgcatggctcagcccaggtcacgtgtc

SEQ ID NO: 11498 - DNA, 122 bp, Homo sapiens
  misc_feature (61)..(62): /note="This region represents a CpG dinucleotide"
  misc_feature (61)..(61): /note="Nucleotide may be methylated to form 5-methylcytosine"
ttatattttagattgcatttccccaagtgaagctgctccagggaagggagctggcttccacgtacactttgttgctgtacttgtcatcgtctgaggggactcagaaattcagtcaccattaa

SEQ ID NO: 11499 - DNA, 122 bp, Homo sapiens
  misc_feature (61)..(62): /note="This region represents a CpG dinucleotide"
  misc_feature (61)..(61): /note="Nucleotide may be methylated to form 5-methylcytosine"
catgtcccctgccctatccatccatacctgatgtaaatatacataggttcaaaagcttctcggccagatgctggctcaatgcagcctgaacctttgccccgcaggaagactttggcacctgt

SEQ ID NO: 11500 - DNA, 122 bp, Homo sapiens
  misc_feature (61)..(62): /note="This region represents a CpG dinucleotide"
  misc_feature (61)..(61): /note="Nucleotide may be methylated to form 5-methylcytosine"
ctgattacatcactggggtgtagcatgtttttctgccctcttatatttcctgtgagttggcgtcaaaggcttaattagattcaggtgttttgttttggatccagcattcttggtgcgttttt

SEQ ID NO: 11501 - DNA, 122 bp, Homo sapiens
  misc_feature (61)..(62): /note="This region represents a CpG dinucleotide"
  misc_feature (61)..(61): /note="Nucleotide may be methylated to form 5-methylcytosine"
cttgaatttcaacaagcctccccactgtgggctaaagtgctctggggtactaaatcagctcgaaaggcagtctaagccaccaggacttcagttatgaggcaagtcctagtgctgaactgggc

SEQ ID NO: 11502 - DNA, 122 bp, Homo sapiens
  misc_feature (61)..(62): /note="This region represents a CpG dinucleotide"
  misc_feature (61)..(61): /note="Nucleotide may be methylated to form 5-methylcytosine"
tgttttggtggcaggcaagtgtctgtggtcaggagccatggagactcgtgccacggactgcgaagccacccagccatctggcccaagctcctgtgaccggaagagcttgttttgccctgttc

SEQ ID NO: 11503 - DNA, 122 bp, Homo sapiens
  misc_feature (61)..(62): /note="This region represents a CpG dinucleotide"
  misc_feature (61)..(61): /note="Nucleotide may be methylated to form 5-methylcytosine"
gtgtgattctgcacgtcattcctggctcaacagcctgaatgagtcctgctggatcactctcgtttctgactcacttctcatatctctgtttagatgaagggaaatcttatagataaacaaga

SEQ ID NO: 11504 - DNA, 122 bp, Homo sapiens
  misc_feature (61)..(62): /note="This region represents a CpG dinucleotide"
  misc_feature (61)..(61): /note="Nucleotide may be methylated to form 5-methylcytosine"
gtgtgggcacagcagggacagttgctggcaagatgggtgtgtgtcctgccctgacagtcacgtgcctgacaggctctagacctagcagggccactcaaggatttactgtccccttggccatg

SEQ ID NO: 11505 - DNA, 122 bp, Homo sapiens
  misc_feature (61)..(62): /note="This region represents a CpG dinucleotide"
  misc_feature (61)..(61): /note="Nucleotide may be methylated to form 5-methylcytosine"
cctgacctctccttccaggtggacttacacactgggctgtcggagttctcggtgacgcagcgccggctggcccatggctggaatgagtttgttgctgacaacagcgaacctgtgtggaagaa

SEQ ID NO: 11506 - DNA, 122 bp, Homo sapiens
  misc_feature (61)..(62): /note="This region represents a CpG dinucleotide"
  misc_feature (61)..(61): /note="Nucleotide may be methylated to form 5-methylcytosine"
tactctataatagtcactctagtgtacaactcttacatagccctctacatagatactcatcgtatgaactagaggccaaaactgtgaacagttattataagtaaaagcacagttattatgca

SEQ ID NO: 11507 - DNA, 122 bp, Homo sapiens
  misc_feature (61)..(62): /note="This region represents a CpG dinucleotide"
  misc_feature (61)..(61): /note="Nucleotide may be methylated to form 5-methylcytosine"
ttcaggcctcacagtgaaatcaggacaagatattcctgcgtagtcctcattcccttgctgcgcttgtcagggaagtggagcacagggtaaagtttgaacttgaagttgggcagatctggatt

SEQ ID NO: 11508 - DNA, 122 bp, Homo sapiens
  misc_feature (61)..(62): /note="This region represents a CpG dinucleotide"
  misc_feature (61)..(61): /note="Nucleotide may be methylated to form 5-methylcytosine"
gactttgtcagagcaggggtggggagaagggaagaagaacaggggagaaagattatcaaacgaaactaacttgtccagaatcgtcagtgagttggtgcaaagctcaaaatcaagatcaagtc

SEQ ID NO: 11509 - DNA, 122 bp, Homo sapiens
  misc_feature (61)..(62): /note="This region represents a CpG dinucleotide"
  misc_feature (61)..(61): /note="Nucleotide may be methylated to form 5-methylcytosine"
gaagagggccaggtctcaggaagctgccctgaggggagtggtgaggtggactctgttgctcgcccaaactgttcattagggaaaaagaggaaaaagtgaaaatatgttgcaaaatgaagggt

SEQ ID NO: 11510 - DNA, 122 bp, Homo sapiens
  misc_feature (61)..(62): /note="This region represents a CpG dinucleotide"
  misc_feature (61)..(61): /note="Nucleotide may be methylated to form 5-methylcytosine"
gctgctcttctggtttaggttctggcctttcccactggggttttccagcagcctctgtagcggtcttcgttgttgagcacttcactgttcatccccaggttctccatccagctgctgttgga

SEQ ID NO: 11511 - DNA, 122 bp, Homo sapiens
  misc_feature (61)..(62): /note="This region represents a CpG dinucleotide"
  misc_feature (61)..(61): /note="Nucleotide may be methylated to form 5-methylcytosine"
gaataatctattcaaaaccttaatgtctttttcttgatccttcttttgagtcctaagtaccgccattacagcttcaaattggcacgtcatataggcgaatttcaaagggagatgcaatccac

SEQ ID NO: 11512 - DNA, 122 bp, Homo sapiens
  misc_feature (61)..(62): /note="This region represents a CpG dinucleotide"
  misc_feature (61)..(61): /note="Nucleotide may be methylated to form 5-methylcytosine"
cccagagcctctgtggtttttaagagtaacacacaggaaggaagctcactgaggtgcaaccgttattagtaccttggggagtttaacaggagcacagtgtagaagcaaaacagctttgtgga

SEQ ID NO: 11513 - DNA, 122 bp, Homo sapiens
  misc_feature (61)..(62): /note="This region represents a CpG dinucleotide"
  misc_feature (61)..(61): /note="Nucleotide may be methylated to form 5-methylcytosine"
aacaatgcatttcttagaccgtatccctgtccttaactgacacatgactaagtttttgcccgtatacaatttttgtactgatttaattcatgtctgctttaatgtccaccacttggtttcca

SEQ ID NO: 11514 - DNA, 122 bp, Homo sapiens
  misc_feature (61)..(62): /note="This region represents a CpG dinucleotide"
  misc_feature (61)..(61): /note="Nucleotide may be methylated to form 5-methylcytosine"
cagtctgattgttgaaagtatgctaaataccaagtaaatgctacagtcataaagtgttgtcgcaggtggagaggagtcagaaagtgttaatgactatgctaaagcttttcttgctaaagtca

SEQ ID NO: 11515 - DNA, 122 bp, Homo sapiens
  misc_feature (61)..(62): /note="This region represents a CpG dinucleotide"
  misc_feature (61)..(61): /note="Nucleotide may be methylated to form 5-methylcytosine"
gacagggccactgacttcagcagagccctgcatgggcccctgctttcctgtcagatgaaacgtgcactgcaacagtgatgactcaagaaattatctcaggatagctggacagaaaccccagc

SEQ ID NO: 11516 - DNA, 122 bp, Homo sapiens
  misc_feature (61)..(62): /note="This region represents a CpG dinucleotide"
  misc_feature (61)..(61): /note="Nucleotide may be methylated to form 5-methylcytosine"
ctgaacgagacagatgagacaagaaaaaggcctccaccttagtcatggccctcagacagacgaacttcaaacttcggtggttctgaaagaaagaaaggctgggcaggcaacccgcctaacag

SEQ ID NO: 11517 - DNA, 122 bp, Homo sapiens
  misc_feature (61)..(62): /note="This region represents a CpG dinucleotide"
  misc_feature (61)..(61): /note="Nucleotide may be methylated to form 5-methylcytosine"
ggttttctgactggtgtttctcctgcctagtaaccatccccagcaccggagacctggcatcggctgattggcaacagatccttctctgagccaccgaaacagattccctaagctagaaggaa

SEQ ID NO: 11518 - DNA, 122 bp, Homo sapiens
  misc_feature (61)..(62): /note="This region represents a CpG dinucleotide"
  misc_feature (61)..(61): /note="Nucleotide may be methylated to form 5-methylcytosine"
accaggttcttcattgtgttgtctttctgccagagacactgtttacttaagtgtaggctacgaggaaataactacactcagggacctgaagtttttgtgactaacagaagagttcatgttat

SEQ ID NO: 11519 - DNA, 122 bp, Homo sapiens
  misc_feature (61)..(62): /note="This region represents a CpG dinucleotide"
  misc_feature (61)..(61): /note="Nucleotide may be methylated to form 5-methylcytosine"
gacacagccctgtcttcaaaacatttcagatatgcttgctgagatggcatttcatgctgccgtaagtgtgtattcttgtcacccagtgtccctcccagtcagggagggatcccatgcaaagt

SEQ ID NO: 11520 - DNA, 122 bp, Homo sapiens
  misc_feature (61)..(62): /note="This region represents a CpG dinucleotide"
  misc_feature (61)..(61): /note="Nucleotide may be methylated to form 5-methylcytosine"
attatgttaagtgaaataagccagacacaaaagactacatcctgtatgaatttatttatacggagttccagaacaggaaaaactggtgaaaaaagatcacaagagtgattttgagggtgggt

SEQ ID NO: 11521 - DNA, 122 bp, Homo sapiens
  misc_feature (61)..(62): /note="This region represents a CpG dinucleotide"
  misc_feature (61)..(61): /note="Nucleotide may be methylated to form 5-methylcytosine"
atgttcccgcccacaatacctgccagagaactacatcacaagtgtcctttttccttatatcgtggaaatgcaactgtgatgcccattagaactgacagggaaactctggtcttcccttttta

SEQ ID NO: 11522 - DNA, 122 bp, Homo sapiens
  misc_feature (61)..(62): /note="This region represents a CpG dinucleotide"
  misc_feature (61)..(61): /note="Nucleotide may be methylated to form 5-methylcytosine"
tgtctcagttttctaaactaaccacactccaggctttgggtgacttagcaaatgtgttggcgtgggaccagcagaaaggcagattctggtcccagcctgtcgctaactagctgggcgacctt

SEQ ID NO: 11523 - DNA, 122 bp, Homo sapiens
  misc_feature (61)..(62): /note="This region represents a CpG dinucleotide"
  misc_feature (61)..(61): /note="Nucleotide may be methylated to form 5-methylcytosine"
acagcgcccacatcctcatgccattgacatgggacgcccgggcccgagtgccaaccactgcgcctgagcagagcctctgcacagcaggatgaggcctggctccaacacaaactgggagagaa

SEQ ID NO: 11524 - DNA, 122 bp, Homo sapiens
  misc_feature (61)..(62): /note="This region represents a CpG dinucleotide"
  misc_feature (61)..(61): /note="Nucleotide may be methylated to form 5-methylcytosine"
ctgccagtgactctcatgtgcattcatgtccctctcttctctctgtcctgtcttctctgccgctgcctcttctctgcaggtacacttgctgaaggaccagttggctgctgaggctgcggcgc

SEQ ID NO: 11525 - DNA, 122 bp, Homo sapiens
  misc_feature (61)..(62): /note="This region represents a CpG dinucleotide"
  misc_feature (61)..(61): /note="Nucleotide may be methylated to form 5-methylcytosine"
tcaagtgtaggaaggctctgggatcaccgggcatggtagtgataatgagactgaggggaacgtggtttccaacgtaggactcagccaaggaactcagggcccagctttcagcccgggagcat

SEQ ID NO: 11526 - DNA, 122 bp, Homo sapiens
  misc_feature (61)..(62): /note="This region represents a CpG dinucleotide"
  misc_feature (61)..(61): /note="Nucleotide may be methylated to form 5-methylcytosine"
tcaccgttcccatgtgtggctgataagggccaggagattccacagttcaggtagttcccccgcctccctggcattttgtggtcaccattaatcatttcctctgtgtatttaagagctctttt

SEQ ID NO: 11527 - DNA, 122 bp, Homo sapiens
  misc_feature (61)..(62): /note="This region represents a CpG dinucleotide"
  misc_feature (61)..(61): /note="Nucleotide may be methylated to form 5-methylcytosine"
atgccccagccttgaccttccagcttcccatctgccagacttgctcaagagagtggctcacggctaaggagtggaaactgacacccagagaaggatctagaacctcgtactcttccatgctc

SEQ ID NO: 11528 - DNA, 122 bp, Homo sapiens
  misc_feature (61)..(62): /note="This region represents a CpG dinucleotide"
  misc_feature (61)..(61): /note="Nucleotide may be methylated to form 5-methylcytosine"
gctggttcttggtaaaacgacttagctagtgtcctttgctaaaactggattttacaaggacgtgcacaaacaggcctagcaggagattcagaagcctgactaaaatttggccaaggaaaaaa

SEQ ID NO: 11529 - DNA, 122 bp, Homo sapiens
  misc_feature (61)..(62): /note="This region represents a CpG dinucleotide"
  misc_feature (61)..(61): /note="Nucleotide may be methylated to form 5-methylcytosine"
cacaatgcacatagtgtttactcctgccctacccttttgctcatacttggaatacttcttcgcataccagcactgaaacatatcattctcttagtttcttttcaaataaactatattttctg

SEQ ID NO: 11530 - DNA, 122 bp, Homo sapiens
  misc_feature (61)..(62): /note="This region represents a CpG dinucleotide"
  misc_feature (61)..(61): /note="Nucleotide may be methylated to form 5-methylcytosine"
ctcacttgttggaaaataggtaaatgagcttatctcaagtccttaattagaacataaccacgtgcaagggagatctcttatcagcatagatgtttttacccacagtttaatgtttgtactgt

SEQ ID NO: 11531 - DNA, 122 bp, Homo sapiens
  misc_feature (61)..(62): /note="This region represents a CpG dinucleotide"
  misc_feature (61)..(61): /note="Nucleotide may be methylated to form 5-methylcytosine"
ttttgtatccttttgcaatgtttttcacagctttcttcctgacactttcacctgcagttgcgtcatcaggattacattatcttggcttgctttctgcccctcttaattatcttattctgtgt

SEQ ID NO: 11532 - DNA, 122 bp, Homo sapiens
  misc_feature (61)..(62): /note="This region represents a CpG dinucleotide"
  misc_feature (61)..(61): /note="Nucleotide may be methylated to form 5-methylcytosine"
cgagccagaattgcaggacctgctaccttgcgctctgctgtgcatacaaagctattaagtcgtcataaaatcagtctgctgttttaccagttagtgggatgtggcagaaagggagaaagtgc

SEQ ID NO: 11533 - DNA, 122 bp, Homo sapiens
  misc_feature (61)..(62): /note="This region represents a CpG dinucleotide"
  misc_feature (61)..(61): /note="Nucleotide may be methylated to form 5-methylcytosine"
ccgggagatgttatggggcaatgcttagctcccagctcccagactaaattctctaacttgcggggacttgcattgggcccgactttgttctctagctccttgaggttaggaatccactgcac

SEQ ID NO: 11534 - DNA, 122 bp, Homo sapiens
  misc_feature (61)..(62): /note="This region represents a CpG dinucleotide"
  misc_feature (61)..(61): /note="Nucleotide may be methylated to form 5-methylcytosine"
gtccatgagagcagggccaagaacgcctaagcccaccagtaagatgcaagaacacctgtgcgaaataataataatgatcatagctgggtgtggtgcctgacagctgtaatcccagcactcag

SEQ ID NO: 11535 - DNA, 122 bp, Homo sapiens
  misc_feature (61)..(62): /note="This region represents a CpG dinucleotide"
  misc_feature (61)..(61): /note="Nucleotide may be methylated to form 5-methylcytosine"
tcttccaggagaactggcaggatttgaattgccaacatcttggaaatccatgcagaaagacgccatataaaatgtcttttaaactgagattgagttaaaggttctgctgtgtagaaaccaag

SEQ ID NO: 11536 - DNA, 122 bp, Homo sapiens
  misc_feature (61)..(62): /note="This region represents a CpG dinucleotide"
  misc_feature (61)..(61): /note="Nucleotide may be methylated to form 5-methylcytosine"
tgtttccctacagagaaatgtccagtggttctatcttcaatctctcttctttaaatagcacgaagatgtcaattcaaaatattaatccaaagtaataaaaatgtcagaaacaactcacgtaa

SEQ ID NO: 11537 - DNA, 122 bp, Homo sapiens
  misc_feature (61)..(62): /note="This region represents a CpG dinucleotide"
  misc_feature (61)..(61): /note="Nucleotide may be methylated to form 5-methylcytosine"
ggaatcagaaaattctggagaggctgcttaggcaacagttttcaagtgtgacttgaaaggcgctgcatttcaaaaccccagggttatgagtgaagaggtgttgaatgaaaggctcttaattg

SEQ ID NO: 11538 - DNA, 122 bp, Homo sapiens
  misc_feature (61)..(62): /note="This region represents a CpG dinucleotide"
  misc_feature (61)..(61): /note="Nucleotide may be methylated to form 5-methylcytosine"
accttgtgattcacccgcctcggcctcccaaagtgctgggattacaggcatgagccaccgcgccgagatctttgtgtggatttctactgttgatttacctgcttcagctgcgactgttcatt

SEQ ID NO: 11539 - DNA, 122 bp, Homo sapiens
  misc_feature (61)..(62): /note="This region represents a CpG dinucleotide"
  misc_feature (61)..(61): /note="Nucleotide may be methylated to form 5-methylcytosine"
tcccactgccaggaatgcccttccctcttctgtcccagtgtttgaaattctgtctttggtcgaccgcactctcctgcccgcaccccctccctgccatggcccttttggtgtccccacacttt

SEQ ID NO: 11540 - DNA, 122 bp, Homo sapiens
  misc_feature (61)..(62): /note="This region represents a CpG dinucleotide"
  misc_feature (61)..(61): /note="Nucleotide may be methylated to form 5-methylcytosine"
ctccacgtgttatattcttctacatatgtgtgtcagccagagtcctgataaatccctacccgtaactatcagacaaaggttcaggaagattagggaaaggaaggcagcaggtgtggggtggg

SEQ ID NO: 11541 - DNA, 122 bp, Homo sapiens
  misc_feature (61)..(62): /note="This region represents a CpG dinucleotide"
  misc_feature (61)..(61): /note="Nucleotide may be methylated to form 5-methylcytosine"
atgggcagccccaggcagctctggggtgtgggcggtcagcagtgctgacttattagtcagcgtaagtcagcgctgagagatgctacaccctctgacagggcatgcattcattaaacgaattc

SEQ ID NO: 11542 - DNA, 122 bp, Homo sapiens
  misc_feature (61)..(62): /note="This region represents a CpG dinucleotide"
  misc_feature (61)..(61): /note="Nucleotide may be methylated to form 5-methylcytosine"
tattaagaggcatcccaagaatgatgacatcacatgtccttctaaggaatcgaacactagcgattgtgaactccagcaagaagatgttttgtctttgagatgagtaatgaggagaaaatggc

SEQ ID NO: 11543 - DNA, 122 bp, Homo sapiens
  misc_feature (61)..(62): /note="This region represents a CpG dinucleotide"
  misc_feature (61)..(61): /note="Nucleotide may be methylated to form 5-methylcytosine"
aaggttactgacagctgccagcagtcttctttgcacaaatcctcttggtgtttgttcaggcgtgtgacttgtctggaccaccagggtgtgaactctaacttgggagacaggagaggcaggtc

SEQ ID NO: 11544 - DNA, 122 bp, Homo sapiens
  misc_feature (61)..(62): /note="This region represents a CpG dinucleotide"
  misc_feature (61)..(61): /note="Nucleotide may be methylated to form 5-methylcytosine"
cactgtcccatgccactctgatcctgagcagccaagtgggcagaatgacactcctttgggcgtggaagtgaacatcagccatgagtagggagaggaaactgcccacagagagggcagactcc

SEQ ID NO: 11545 - DNA, 122 bp, Homo sapiens
  misc_feature (61)..(62): /note="This region represents a CpG dinucleotide"
  misc_feature (61)..(61): /note="Nucleotide may be methylated to form 5-methylcytosine"
tgtcaatctagagtagcgaaaaaacaagcttgagggttacacgacccttgttatctgtgtcgtctcgttcaggcccaacacttcctgctattcttttccactatggtcttgtgtcatcatct

SEQ ID NO: 11546 - DNA, 122 bp, Homo sapiens
  misc_feature (61)..(62): /note="This region represents a CpG dinucleotide"
  misc_feature (61)..(61): /note="Nucleotide may be methylated to form 5-methylcytosine"
agtagttgcaatgctgttcatttttctggtgagtggattctggtaaaagtccttcataatcgtgcccattgtaaacaagtgaaaactttttagaaaatgttagtgggcattatttctaacct

SEQ ID NO: 11547 - DNA, 122 bp, Homo sapiens
  misc_feature (61)..(62): /note="This region represents a CpG dinucleotide"
  misc_feature (61)..(61): /note="Nucleotide may be methylated to form 5-methylcytosine"
ccagcccctggagggcagtgacctctggtccttaaacaaggaggacacgtcggaacaagtcgtgcctgttttggtaaagaactggaagaaggaatgcgccaagactaggaagtaagtgtgag

SEQ ID NO: 11548 - DNA, 122 bp, Homo sapiens
  misc_feature (61)..(62): /note="This region represents a CpG dinucleotide"
  misc_feature (61)..(61): /note="Nucleotide may be methylated to form 5-methylcytosine"
ctggtgaggtcccccttcaaccctgaatagggatttctactcccccaggactggtgcccacgaggagtttcaaggcccccgacaccagtgccctggaaagaatttataaattcacctaagtc

SEQ ID NO: 11549 - DNA, 122 bp, Homo sapiens
  misc_feature (61)..(62): /note="This region represents a CpG dinucleotide"
  misc_feature (61)..(61): /note="Nucleotide may be methylated to form 5-methylcytosine"
caggcccttccgacccccacctgcaccccctccctccctaggctggtcccgctccgcacccggaacgtgtccgccacgatctcagctcctcggtgattggtccatttggagaggcctacgaa

SEQ ID NO: 11550 - DNA, 122 bp, Homo sapiens
  misc_feature (61)..(62): /note="This region represents a CpG dinucleotide"
  misc_feature (61)..(61): /note="Nucleotide may be methylated to form 5-methylcytosine"
aagtgcatttctccttgtgactcatgaagaacagtgcactcaccctcctcactgagcaggcgtcctgttttactgtgataggaaaattcatggcagcaccacgctgtgtgaggtgagtctgc

SEQ ID NO: 11551 - DNA, 122 bp, Homo sapiens
  misc_feature (61)..(62): /note="This region represents a CpG dinucleotide"
  misc_feature (61)..(61): /note="Nucleotide may be methylated to form 5-methylcytosine"
cattataagcaaaggcaggttgagctgaaatccgcatagttatttcagagtaaaatgatacggagcacatggctggcagaaaaaacagtcacatgactgttaagaaccagacttgggctatt

SEQ ID NO: 11552 - DNA, 122 bp, Homo sapiens
  misc_feature (61)..(62): /note="This region represents a CpG dinucleotide"
  misc_feature (61)..(61): /note="Nucleotide may be methylated to form 5-methylcytosine"
aatttacttaagtgatacatatttttaatcctaattaggaaacagctttgaagtgtggagcgggaaaggagcagtttctgagctgcaaaaactagtttctaaacaggtaatttgacattatt

SEQ ID NO: 11553 - DNA, 122 bp, Homo sapiens
  misc_feature (61)..(62): /note="This region represents a CpG dinucleotide"
  misc_feature (61)..(61): /note="Nucleotide may be methylated to form 5-methylcytosine"
ctcctggcctcaagtgatccacccacctcagcctcccaaagtacagggattataggcgtgcgccactgtgcccggccgagaacaatttgtcacaagcttacttttctagttttgccaatgca

SEQ ID NO: 11554 - DNA, 122 bp, Homo sapiens
  misc_feature (61)..(62): /note="This region represents a CpG dinucleotide"
  misc_feature (61)..(61): /note="Nucleotide may be methylated to form 5-methylcytosine"
tgaagaccaagttccaaacactctgggctctgcacaaggctccatgtgacctgtttgtgccgcagtcagctatgaggcctgcaagggcggatccctttgtgtatccgtgttgccagtacctg

SEQ ID NO: 11555 - DNA, 122 bp, Homo sapiens
  misc_feature (61)..(62): /note="This region represents a CpG dinucleotide"
  misc_feature (61)..(61): /note="Nucleotide may be methylated to form 5-methylcytosine"
attgagtgtctttgcatatgcaagacgttatgctcattcaggattggggcatcaatcactcgagcataatagactttgtcagcctcataaattctgggatttaaagagttaaaggatcactg

SEQ ID NO: 11556 - DNA, 122 bp, Homo sapiens
  misc_feature (61)..(62): /note="This region represents a CpG dinucleotide"
  misc_feature (61)..(61): /note="Nucleotide may be methylated to form 5-methylcytosine"
tcccccaccactctctgtgcctgatgggaccttgagcctcctgctgtcctcctcagccaacgcctctgggactcatcctcttggcgatattcatggtgtcatggcacaggtcccagcaggag

SEQ ID NO: 11557 - DNA, 122 bp, Homo sapiens
  misc_feature (61)..(62): /note="This region represents a CpG dinucleotide"
  misc_feature (61)..(61): /note="Nucleotide may be methylated to form 5-methylcytosine"
tactgttgctttctggccaaagacaggtcaagtgctgggaactctcgggactcacagtcacgctagtgacgtgctagagcacatctccccactgtggattatccagaatgactcaaacttgc

SEQ ID NO: 11558 - DNA, 122 bp, Homo sapiens
  misc_feature (61)..(62): /note="This region represents a CpG dinucleotide"
  misc_feature (61)..(61): /note="Nucleotide may be methylated to form 5-methylcytosine"
gggatttacaaaaaggaaccagctgcttgaaggcacttattctgcagctgtagtaggattcgggcacatagaaaccacccaaagataggcgccttcctgctgacctctaggggcattaaaag

SEQ ID NO: 11559 - DNA, 122 bp, Homo sapiens
  misc_feature (61)..(62): /note="This region represents a CpG dinucleotide"
  misc_feature (61)..(61): /note="Nucleotide may be methylated to form 5-methylcytosine"
aagcctagtcctgatgaatcaaggtgggtgtggacacagccaaggtgatgcctgagctgacggaagtcatagttgccatgttgtgagcaaagcatttttataaccattcttagtacatgttc

SEQ ID NO: 11560 - DNA, 122 bp, Homo sapiens
  misc_feature (61)..(62): /note="This region represents a CpG dinucleotide"
  misc_feature (61)..(61): /note="Nucleotide may be methylated to form 5-methylcytosine"
tgagggagggcatgtcaaatgtgtgtcatggccgagacacctccaaaaagccactgctgccgcctgagcagagcatgctgaaggctgtggtttactgacttcatcacaagccctagaggaaa

SEQ ID NO: 11561 - DNA, 122 bp, Homo sapiens
  misc_feature (61)..(62): /note="This region represents a CpG dinucleotide"
  misc_feature (61)..(61): /note="Nucleotide may be methylated to form 5-methylcytosine"
caacatggggaagaggaagactttctccctgttgatcatccacacaaaagtgtacttccccgccacctactgactccacatgcccggtcagttacacctgaaatcttttttttttttttttt

SEQ ID NO: 11562 - DNA, 122 bp, Homo sapiens
  misc_feature (61)..(62): /note="This region represents a CpG dinucleotide"
  misc_feature (61)..(61): /note="Nucleotide may be methylated to form 5-methylcytosine"
ccctgaggccagggatgaggactcacacacacacacacacacacacactacacacgtgtgcgtgcatatgacaggtcaccaagggttatgcaaccaggcctcagagacaggaatagcctctg

SEQ ID NO: 11563 - DNA, 122 bp, Homo sapiens
  misc_feature (61)..(62): /note="This region represents a CpG dinucleotide"
  misc_feature (61)..(61): /note="Nucleotide may be methylated to form 5-methylcytosine"
agcccagtgtacaaaactgggattgagggattgaattatcattgtgttttgtacacagcccggagtgctcaagacattccaaaaaggttaaatgacagcagtagcagtcacccctcttatgc

SEQ ID NO: 11564 - DNA, 122 bp, Homo sapiens
  misc_feature (61)..(62): /note="This region represents a CpG dinucleotide"
  misc_feature (61)..(61): /note="Nucleotide may be methylated to form 5-methylcytosine"
ggcatgtgggtggtgcttaacagactggctgatgagacaacgtgcatcaacaaaggacaccgtaagtccttacctaatgctgtcaacaggctcttggaaactatggctttaagcaaaatgac

SEQ ID NO: 11565 - DNA, 122 bp, Homo sapiens
  misc_feature (61)..(62): /note="This region represents a CpG dinucleotide"
  misc_feature (61)..(61): /note="Nucleotide may be methylated to form 5-methylcytosine"
tgcgagagaggaagtctttcccacagtgcagctgagtggtggagccaggtcttgcttgtgcgtgtgcatcctgtctccctcctctgtgttattctgcttagtcacacacctagtgtcagcct

SEQ ID NO: 11566 - DNA, 122 bp, Homo sapiens
  misc_feature (61)..(62): /note="This region represents a CpG dinucleotide"
  misc_feature (61)..(61): /note="Nucleotide may be methylated to form 5-methylcytosine"
caaatatgcagtgagaccttgatcctgtcttaacatttgatctcagacagacaaatgacacgtaaaaacacaaggtcagagtgaattagaggcaggagaatgaaacacactgatacagaatg

SEQ ID NO: 11567 - DNA, 122 bp, Homo sapiens
  misc_feature (61)..(62): /note="This region represents a CpG dinucleotide"
  misc_feature (61)..(61): /note="Nucleotide may be methylated to form 5-methylcytosine"
tcctctttctgtgtcttgtgatctcacttaactcatcctgctagagtcaacagatctctccgtgcacaggaagccagactatcaaggcagcaaagagttttaaggcagctaagtgaacagtt

SEQ ID NO: 11568 - DNA, 122 bp, Homo sapiens
  misc_feature (61)..(62): /note="This region represents a CpG dinucleotide"
  misc_feature (61)..(61): /note="Nucleotide may be methylated to form 5-methylcytosine"
atgagctgtgtggtcctgggaaagccttggtgtcctcttttacctgcacagtgagggtgacggtcgtgttacctcctgaggccacctttcagctttgccattctgtcatttgacaaagactg

SEQ ID NO: 11569 - DNA, 122 bp, Homo sapiens
  misc_feature (61)..(62): /note="This region represents a CpG dinucleotide"
  misc_feature (61)..(61): /note="Nucleotide may be methylated to form 5-methylcytosine"
acagtgatgttcttggcaatagggacagacatgagataggacagctttaactaagatcatcgtcacaatgctatctgcatttgcagatttagagtggctttataacaaggatcaaaaaaact

SEQ ID NO: 11570 - DNA, 122 bp, Homo sapiens
  misc_feature (61)..(62): /note="This region represents a CpG dinucleotide"
  misc_feature (61)..(61): /note="Nucleotide may be methylated to form 5-methylcytosine"
tctggtagctacggtgacttgtgttgaactcactgttccctgcattgttctgagtgcccacgtaataatccagttaatcctcacgattctttgaggtgctgtcacccccattttgtgtatga

SEQ ID NO: 11571 - DNA, 122 bp, Homo sapiens
  misc_feature (61)..(62): /note="This region represents a CpG dinucleotide"
  misc_feature (61)..(61): /note="Nucleotide may be methylated to form 5-methylcytosine"
gaagagccaatctggagttttgaaaattaaaccacaaaaatgcaaaaggataaagcctgacgtacgtatatgattgcaagaggtcatgtatccaggtcaagacaaagtcccctgggaataag

SEQ ID NO: 11572 - DNA, 122 bp, Homo sapiens
  misc_feature (61)..(62): /note="This region represents a CpG dinucleotide"
  misc_feature (61)..(61): /note="Nucleotide may be methylated to form 5-methylcytosine"
gcctgtggccgctgggaggctgcgccatggcccgctccggagagctgcgaggtggctctgcgaggtttggctggagctgggcagcgaggcctgcccacgggtgggagagccgccgacccgtc

SEQ ID NO: 11573 - DNA, 122 bp, Homo sapiens
  misc_feature (61)..(62): /note="This region represents a CpG dinucleotide"
  misc_feature (61)..(61): /note="Nucleotide may be methylated to form 5-methylcytosine"
agaagttgggactatttaaacagattagaatgctaaggttttgtgaggtcacacagagagcgagtgacagagtccagactgaatctggggttactcacctccaaatgcttccctgggtaaaa

SEQ ID NO: 11574 - DNA, 122 bp, Homo sapiens
  misc_feature (61)..(62): /note="This region represents a CpG dinucleotide"
  misc_feature (61)..(61): /note="Nucleotide may be methylated to form 5-methylcytosine"
gtgagtagaaggcagcaaggcatgagttattgtaactgataaagcaggggtggcgcagtgcggggttggtggggaggtgattgatcaagtgagtcatcatcctgccccagggaacaatggtc

SEQ ID NO: 11575 - DNA, 122 bp, Homo sapiens
  misc_feature (61)..(62): /note="This region represents a CpG dinucleotide"
  misc_feature (61)..(61): /note="Nucleotide may be methylated to form 5-methylcytosine"
cttgttccctgccgtcctcctagtacctacctcagtgcttggagaatgcatgaatgtatgcgtgccccagtcctccctgccatccacacatcctgcccacattccccagagcagctttgaca

SEQ ID NO: 11576 - DNA, 122 bp, Homo sapiens
  misc_feature (61)..(62): /note="This region represents a CpG dinucleotide"
  misc_feature (61)..(61): /note="Nucleotide may be methylated to form 5-methylcytosine"
tatatccttgctgattttcttgcttggttactccaccatttattgagaaataggtgttgacgtctccaattataattttggacttgtgtatttctctttttagttccatcagtcttttttca

SEQ ID NO: 11577 - DNA, 122 bp, Homo sapiens
  misc_feature (61)..(62): /note="This region represents a CpG dinucleotide"
  misc_feature (61)..(61): /note="Nucleotide may be methylated to form 5-methylcytosine"
ggctcagagaggtgaaatgaccccaaggcacaggctccaaggtaggctttgagcctctgacgtatgacttggacaacaccctcaaccttgctttgtgttttccgtgagtctaaggaggggtt

SEQ ID NO: 11578 - DNA, 122 bp, Homo sapiens
  misc_feature (61)..(62): /note="This region represents a CpG dinucleotide"
  misc_feature (61)..(61): /note="Nucleotide may be methylated to form 5-methylcytosine"
tgcaggtggaggtgaccccaagatatggtgacacaagtctgaagtatagaaaagatgtctcggatggagaatagttgagtcattgtgtaggaaacgtttagatttatcataaaggaagatta

SEQ ID NO: 11579 - DNA, 122 bp, Homo sapiens
  misc_feature (61)..(62): /note="This region represents a CpG dinucleotide"
  misc_feature (61)..(61): /note="Nucleotide may be methylated to form 5-methylcytosine"
ctcaaaaatccagttactcaactacctgatttgccagtggagctggccctggttcttgtccgtgggacagggtgagtcaggggattgaattgggggttctctggactcagggcctagggctt

SEQ ID NO: 11580 - DNA, 122 bp, Homo sapiens
  misc_feature (61)..(62): /note="This region represents a CpG dinucleotide"
  misc_feature (61)..(61): /note="Nucleotide may be methylated to form 5-methylcytosine"
cctgttcggggctccttttgctgctaaggggtctggccgggattagcaattgtgggaagccgccctgagaagagaaagcaccgtcccagcccttaacgaatgtgcagcgtcactggagagac

SEQ ID NO: 11581 - DNA, 122 bp, Homo sapiens
  misc_feature (61)..(62): /note="This region represents a CpG dinucleotide"
  misc_feature (61)..(61): /note="Nucleotide may be methylated to form 5-methylcytosine"
aacctgaagtaagctaagttaaacaatcagttttcttcttccactgttctgtttccttgtcgccaacttacaaacatcactgttctgccactgcccagagggagctctcattctattttgta

SEQ ID NO: 11582 - DNA, 122 bp, Homo sapiens
  misc_feature (61)..(62): /note="This region represents a CpG dinucleotide"
  misc_feature (61)..(61): /note="Nucleotide may be methylated to form 5-methylcytosine"
cttcatactttacatgatcttcaaaatgtaaaactgttcttttgaatgaaatgatactaccgatactaccctcttaatcatcaggtaatgaatgaaatgatactatcctcttaatctcaggc

SEQ ID NO: 11583 - DNA, 122 bp, Homo sapiens
  misc_feature (61)..(62): /note="This region represents a CpG dinucleotide"
  misc_feature (61)..(61): /note="Nucleotide may be methylated to form 5-methylcytosine"
aatgtaactcatttaatcctcccagaaaacctgcagggtcagaatcattactccattttacggatgccggatgtcttctcagctaatcctcccatccaatcctctgggaagcctttcaggat

SEQ ID NO: 11584 - DNA, 122 bp, Homo sapiens
  misc_feature (61)..(62): /note="This region represents a CpG dinucleotide"
  misc_feature (61)..(61): /note="Nucleotide may be methylated to form 5-methylcytosine"
ggtcttgtgggacacagacagacctgatgacttttcagatagaattgcagactgagtaggcggaggaatggagtagatatattattagagtttgtcatccagggcctggcaggataatcagt

SEQ ID NO: 11585 - DNA, 122 bp, Homo sapiens
  misc_feature (61)..(62): /note="This region represents a CpG dinucleotide"
  misc_feature (61)..(61): /note="Nucleotide may be methylated to form 5-methylcytosine"
cagcagccatttgttgtccctgtggggagcccagaaaacccagcccggttctcccacctgcggggaagaaatgaagcaatgataatgaagacactcccatgccaagcccatactgccctgag

SEQ ID NO: 11586 - DNA, 122 bp, Homo sapiens
  misc_feature (61)..(62): /note="This region represents a CpG dinucleotide"
  misc_feature (61)..(61): /note="Nucleotide may be methylated to form 5-methylcytosine"
gaaaggaggagcctcaacagaacttgccaagtgtctgcatgaaactatgacaacagaggccgggcgcagtggctcacgcctgtaatcccagaactttgggaggccaaggcaggcggatcaca

SEQ ID NO: 11587 - DNA, 122 bp, Homo sapiens
  misc_feature (61)..(62): /note="This region represents a CpG dinucleotide"
  misc_feature (61)..(61): /note="Nucleotide may be methylated to form 5-methylcytosine"
gtgattgcatttagggcccatgtggataatgcagggtaacctccccatcctaagatcattcgtttcatcacacctgcagagtctcttctgctatatgaggattattcacaggctccagggtg

SEQ ID NO: 11588 - DNA, 122 bp, Homo sapiens
  misc_feature (61)..(62): /note="This region represents a CpG dinucleotide"
  misc_feature (61)..(61): /note="Nucleotide may be methylated to form 5-methylcytosine"
ctccgtgggtccccaagaaaggcagccctgctgggggcagtgaagcccttatccaggtcacgtgagtcttggaaggggaaggctgctgtgcttaacgattcaaaaacacaaatcaaacctcc

SEQ ID NO: 11589 - DNA, 122 bp, Homo sapiens
  misc_feature (61)..(62): /note="This region represents a CpG dinucleotide"
  misc_feature (61)..(61): /note="Nucleotide may be methylated to form 5-methylcytosine"
cgtctcaaaaaaaaaaaagtcatctagtcagtctagtcatgcttaaatcccccagcctgacgcagatactgagccgaggagccaccctaagggaaaatgggttttttcctgctcgtgtttgc

SEQ ID NO: 11590 - DNA, 122 bp, Homo sapiens
  misc_feature (61)..(62): /note="This region represents a CpG dinucleotide"
  misc_feature (61)..(61): /note="Nucleotide may be methylated to form 5-methylcytosine"
tgcatggcttgggtggggatgactaacttgactcaaattactcatccctgggccagactgcggtagcctggggaccaggtgaaggaatctcaaccttatattgtaaaggcaatggggagcag

SEQ ID NO: 11591 - DNA, 122 bp, Homo sapiens
  misc_feature (61)..(62): /note="This region represents a CpG dinucleotide"
  misc_feature (61)..(61): /note="Nucleotide may be methylated to form 5-methylcytosine"
tgagtgagcagataaaggagcttgaattagtctatagaacaatagggtagctctctggaccggtcagtgactcagaatattgatgaaagttgtgtaactgagcagagaaaagaggtatgcct

SEQ ID NO: 11592 - DNA, 122 bp, Homo sapiens
  misc_feature (61)..(62): /note="This region represents a CpG dinucleotide"
  misc_feature (61)..(61): /note="Nucleotide may be methylated to form 5-methylcytosine"
ttgggaggtttatgctgacaagcagaatgagcaaacgtggttcttcacagcaagggcagacggtgtggctagccagaggcagatgtttgctactttgcctcacacatttatgacttttggga

SEQ ID NO: 11593 - DNA, 122 bp, Homo sapiens
  misc_feature (61)..(62): /note="This region represents a CpG dinucleotide"
  misc_feature (61)..(61): /note="Nucleotide may be methylated to form 5-methylcytosine"
agctccgagcccattggagttcctaccacatagggccaaaattcactggaagcagagccccgcagagcaactctgccagaccagcacctagagcaggggagacaaacaggtgcctaaagggg

SEQ ID NO: 11594 - DNA, 122 bp, Homo sapiens
  misc_feature (61)..(62): /note="This region represents a CpG dinucleotide"
  misc_feature (61)..(61): /note="Nucleotide may be methylated to form 5-methylcytosine"
cctttcctatagagttctcacttatgcaacactgcaagtatagcctttgttgacttgtatcggagttgccatctatacatgttaatgtatttgatacaaaatcatgcaccatgatataatgt

SEQ ID NO: 11595 - DNA, 122 bp, Homo sapiens
  misc_feature (61)..(62): /note="This region represents a CpG dinucleotide"
  misc_feature (61)..(61): /note="Nucleotide may be methylated to form 5-methylcytosine"
ttatgatttggcttagtgtacgtgcagtgacccatgtgtgcatattgatcatcaatccatcgtggctttcttagctatcttggctttcttttgttagcagagcttacctgcaactgtagttt

SEQ ID NO: 11596 - DNA, 122 bp, Homo sapiens
  misc_feature (61)..(62): /note="This region represents a CpG dinucleotide"
  misc_feature (61)..(61): /note="Nucleotide may be methylated to form 5-methylcytosine"
gttaggttagttgaaagacactagtcacaaaagaccacatattatctgattctatttatacgaaaggtccagaataggcagatctatagagacaaaaggtagattattggtaacctaggacg

SEQ ID NO: 11597 - DNA, 122 bp, Homo sapiens
  misc_feature (61)..(62): /note="This region represents a CpG dinucleotide"
  misc_feature (61)..(61): /note="Nucleotide may be methylated to form 5-methylcytosine"
cagcaagtaagtggcgaagccaggatttgaacccaggctgtccggctttaagcctggctgcgtctgttgagtgagaggatgcagcgtgagaagaggaagaatgggaaacagccttgggaggg

SEQ ID NO: 11598 - DNA, 122 bp, Homo sapiens
  misc_feature (61)..(62): /note="This region represents a CpG dinucleotide"
  misc_feature (61)..(61): /note="Nucleotide may be methylated to form 5-methylcytosine"
ctcacgtcatcttctgtctttgtgtctgtctctgtgtctatgtttcccctttctctaaggcgcagtcatactgggcccaccctactggctttgtcttgactacctctgcaaagaccctatta

SEQ ID NO: 11599 - DNA, 122 bp, Homo sapiens
  misc_feature (61)..(62): /note="This region represents a CpG dinucleotide"
  misc_feature (61)..(61): /note="Nucleotide may be methylated to form 5-methylcytosine"
gataaaccctgctgagtaagtgactgagtcagaagtggagaaagattgaacaaagactctcgttcttaccctgctgttgtgaaagagaattgcggctggcactttatttcttgggcttcaga

SEQ ID NO: 11600 - DNA, 122 bp, Homo sapiens
  misc_feature (61)..(62): /note="This region represents a CpG dinucleotide"
  misc_feature (61)..(61): /note="Nucleotide may be methylated to form 5-methylcytosine"
cgcattaagaaaagctggagccgaggtgtggtgtagtgctggccatgatgcaaagctcagcgtgctgccccaaatgagtccctctgagcagcaggcattgtggagagactcaagctctaatt

SEQ ID NO: 11601 - DNA, 122 bp, Homo sapiens
  misc_feature (61)..(62): /note="This region represents a CpG dinucleotide"
  misc_feature (61)..(61): /note="Nucleotide may be methylated to form 5-methylcytosine"
ctaggattttaacagctgaggatgtggggaaagggtatttcaggctgagggcatgaggggcgcaagtaactacacaagggtgtgaaaatggcacaacccattaagggctgaaatggcagatg

SEQ ID NO: 11602 - DNA, 122 bp, Homo sapiens
  misc_feature (61)..(62): /note="This region represents a CpG dinucleotide"
  misc_feature (61)..(61): /note="Nucleotide may be methylated to form 5-methylcytosine"
cctacttactggggctttgagtatttcaggcactcttgccccatcccctctgtcaccacccgcaagcctcatcaagcctctaatctggaggtgggtggtggtaaatgagcaagagggaactt

SEQ ID NO: 11603 - DNA, 122 bp, Homo sapiens
  misc_feature (61)..(62): /note="This region represents a CpG dinucleotide"
  misc_feature (61)..(61): /note="Nucleotide may be methylated to form 5-methylcytosine"
atggttatttatagctcatgattcatccaaggactgagttattctccccatgaggctaaccggcctctttcccaacacttaatcatggcagccaggatgggtgaatgatgaaagctcttctg

SEQ ID NO: 11604 - DNA, 122 bp, Homo sapiens
  misc_feature (61)..(62): /note="This region represents a CpG dinucleotide"
  misc_feature (61)..(61): /note="Nucleotide may be methylated to form 5-methylcytosine"
cagcttgtttattactcaggtacggagctggactatcttactgagcctgttctcctggggcggcctcggctgctgctcctctgagggctcggccctgggtggggtgcaatcacctttggtgg

SEQ ID NO: 11605 - DNA, 122 bp, Homo sapiens
  misc_feature (61)..(62): /note="This region represents a CpG dinucleotide"
  misc_feature (61)..(61): /note="Nucleotide may be methylated to form 5-methylcytosine"
aatacatctgctgtcatcactgggacttggctgccatgggagctacgtagttgagcttgacgtattaatactaccaacattttgcatagtagccagtttgtaaactggaagccactctgctt

SEQ ID NO: 11606 - DNA, 122 bp, Homo sapiens
  misc_feature (61)..(62): /note="This region represents a CpG dinucleotide"
  misc_feature (61)..(61): /note="Nucleotide may be methylated to form 5-methylcytosine"
gaactctgtggtaagagttatgatgacatcaggggacaggtttgcgcaaggcacactggacggaacatagagtaagatgatccagtggtgtctagaatgtggataatacccaatgtattttt

SEQ ID NO: 11607 - DNA, 122 bp, Homo sapiens
  misc_feature (61)..(62): /note="This region represents a CpG dinucleotide"
  misc_feature (61)..(61): /note="Nucleotide may be methylated to form 5-methylcytosine"
atcacaccactgcaatccagtgttagcaccacaaagcatctaaaagagccagtttgtggtcgtgaaaatattgccttattattttaccctgtcccttaataaccatgcctcaggctcattcc

SEQ ID NO: 11608 - DNA, 122 bp, Homo sapiens
  misc_feature (61)..(62): /note="This region represents a CpG dinucleotide"
  misc_feature (61)..(61): /note="Nucleotide may be methylated to form 5-methylcytosine"
gagggtgtgggcaagcctgtggctcttattcacaggattcactgcctggaacagtctaggcgtggctggattttgggctttggatcgcaaaagaggtagaccctgcccactgccatcctgct

SEQ ID NO: 11609 - DNA, 122 bp, Homo sapiens
  misc_feature (61)..(62): /note="This region represents a CpG dinucleotide"
  misc_feature (61)..(61): /note="Nucleotide may be methylated to form 5-methylcytosine"
ctcctgataaatcttacttcactttatgatccatcttattcacagctgttgagtcaggcacgactaaggttaaatcttagttctgcccttattggctatatgaccttggataaatagaaggt

SEQ ID NO: 11610 - DNA, 122 bp, Homo sapiens
  misc_feature (61)..(62): /note="This region represents a CpG dinucleotide"
  misc_feature (61)..(61): /note="Nucleotide may be methylated to form 5-methylcytosine"
agttggatacatgggcacggaaggctcatacacggccaaagaaggctagtcacatgggcacggaaggttgctacctggacacagaatgtcaacagtgatgacagctaatacattgtgggcac

SEQ ID NO: 11611 - DNA, 122 bp, Homo sapiens
  misc_feature (61)..(62): /note="This region represents a CpG dinucleotide"
  misc_feature (61)..(61): /note="Nucleotide may be methylated to form 5-methylcytosine"
tgcagacaagcaggaagccatgtgtcataaaattacttgtccttcacgaagccggaggtgcgtggtcacttgccttgaggggcagtgcactctctgcccaactaactcagcaagatcttcct

SEQ ID NO: 11612 - DNA, 122 bp, Homo sapiens
  misc_feature (61)..(62): /note="This region represents a CpG dinucleotide"
  misc_feature (61)..(61): /note="Nucleotide may be methylated to form 5-methylcytosine"
gaacggattctgggcttcagactctctgtccagtgcattgccaatggtccttttgtgaggcgtgtcctgcaagatgaccttggggcctgagccacatctatgtgccatccagcctggctctc

SEQ ID NO: 11613 - DNA, 122 bp, Homo sapiens
  misc_feature (61)..(62): /note="This region represents a CpG dinucleotide"
  misc_feature (61)..(61): /note="Nucleotide may be methylated to form 5-methylcytosine"
gcaaaagcaagacattaaatttgcaaagcaacaagtttaaggctcacaatccaggctacacgggctcagtgctttccagtttgcatagagaggtgcacaataggcctgaagggaggtgctga

SEQ ID NO: 11614 - DNA, 122 bp, Homo sapiens
  misc_feature (61)..(62): /note="This region represents a CpG dinucleotide"
  misc_feature (61)..(61): /note="Nucleotide may be methylated to form 5-methylcytosine"
atatgtagtgtaaatggctgactgttactgatctaacccaggccatttaacccatataagcgcaccctcctggtgcaattcagcaagttcttttgtcctcggtatttcctacaatccagcag

SEQ ID NO: 11615 - DNA, 122 bp, Homo sapiens
  misc_feature (61)..(62): /note="This region represents a CpG dinucleotide"
  misc_feature (61)..(61): /note="Nucleotide may be methylated to form 5-methylcytosine"
ggaaacacagcctcaggccagaagccagaaaactgcactttgaagttcagagggataagacggatttatgctgaataggtggcgcaatatacatattcagtaagctgtaggaggagttatga

SEQ ID NO: 11616 - DNA, 122 bp, Homo sapiens
  misc_feature (61)..(62): /note="This region represents a CpG dinucleotide"
  misc_feature (61)..(61): /note="Nucleotide may be methylated to form 5-methylcytosine"
agaaaaggaagatggcaaatgtcaacatttcttacaacacatttagttatgaatgacacacgacagatcctgggagacagtgcaggggttcaccagagaatttaacagaattgtattctgag

SEQ ID NO: 11617 - DNA, 122 bp, Homo sapiens
  misc_feature (61)..(62): /note="This region represents a CpG dinucleotide"
  misc_feature (61)..(61): /note="Nucleotide may be methylated to form 5-methylcytosine"
atgtttgatcagcaattttagtagtgccctactgggaggagtttctctgaacatcagatccgccatgtgttgcttggaggtagcttcgagcaattaagtggattatgcttcataataaattt

SEQ ID NO: 11618 - DNA, 122 bp, Homo sapiens
  misc_feature (61)..(62): /note="This region represents a CpG dinucleotide"
  misc_feature (61)..(61): /note="Nucleotide may be methylated to form 5-methylcytosine"
agtacaaggcagtctcctgttgggagtgttatagcaggaagtaggatacagcgtttttggcgtggtagtcacagggtgaaggaagtaggaaaaggatattacataacacatcacagttttga

SEQ ID NO: 11619 - DNA, 122 bp, Homo sapiens
  misc_feature (61)..(62): /note="This region represents a CpG dinucleotide"
  misc_feature (61)..(61): /note="Nucleotide may be methylated to form 5-methylcytosine"
cgtctgggccaggatagagaggggagtaagatagacctttccttgctgttacagaacttacgtctttgttggagagacaggaaataaacaagtaagttaaaaacccacaatttggggtagag

SEQ ID NO: 11620 - DNA, 122 bp, Homo sapiens
  misc_feature (61)..(62): /note="This region represents a CpG dinucleotide"
  misc_feature (61)..(61): /note="Nucleotide may be methylated to form 5-methylcytosine"
ttgggatggagggaattcctagggtatggaactttcagcactaaaacttggtctccctagcgtggtgcacaggaaagctggtctgataggtactgaaaacattcaaactagattcagttccg

SEQ ID NO: 11621 - DNA, 122 bp, Homo sapiens
  misc_feature (61)..(62): /note="This region represents a CpG dinucleotide"
  misc_feature (61)..(61): /note="Nucleotide may be methylated to form 5-methylcytosine"
actcccagtagaaacaccattgtggatacttaggtgactcagtagctatggaagataagacggatcagagaccaggatcaagggagataaatattttcaaagagctttgagttattcaagaa

SEQ ID NO: 11622 - DNA, 122 bp, Homo sapiens
  misc_feature (61)..(62): /note="This region represents a CpG dinucleotide"
  misc_feature (61)..(61): /note="Nucleotide may be methylated to form 5-methylcytosine"
ggtctcactatgtcacccaggctggttttgaaatcctcagctaaagtgatccttctggatcggcttcccaaagtactgggattacaggtgtgagtcactgcaccagggccattcagtcttat

SEQ ID NO: 11623 - DNA, 122 bp, Homo sapiens
  misc_feature (61)..(62): /note="This region represents a CpG dinucleotide"
  misc_feature (61)..(61): /note="Nucleotide may be methylated to form 5-methylcytosine"
tggtaaagggacttgctcaaggccacacatctcaaatcaagccatttgcagtggagccaacgcatagggtcaccatgccacacctaagtgccctgtgatgcactaagctgttcatgtaagtc

SEQ ID NO: 11624 - DNA, 122 bp, Homo sapiens
  misc_feature (61)..(62): /note="This region represents a CpG dinucleotide"
  misc_feature (61)..(61): /note="Nucleotide may be methylated to form 5-methylcytosine"
taatccaaaaacctcagagctgaggaagcacaaccttcagaccaactctcagaagcagggcggaatgagaaagacacagaacagtacaatgtttgaatcatgatgaagcctttcaacagcat

SEQ ID NO: 11625 - DNA, 122 bp, Homo sapiens
  misc_feature (61)..(62): /note="This region represents a CpG dinucleotide"
  misc_feature (61)..(61): /note="Nucleotide may be methylated to form 5-methylcytosine"
agcctgctcagcaacccaaacagctatgagacagctgctgcattaaagctgatgacttcacgcagctcattctgtcaagtaagcgttatcattatttaaatgacagagtggtatgaggtacg

SEQ ID NO: 11626 - DNA, 122 bp, Homo sapiens
  misc_feature (61)..(62): /note="This region represents a CpG dinucleotide"
  misc_feature (61)..(61): /note="Nucleotide may be methylated to form 5-methylcytosine"
gttaatccttacaacagagcataacatggggattattactgattatccttattttacacacgggaaagactcaagtacagagaaactaaggatcttgcttgaggtcatgtgactagtagaca

SEQ ID NO: 11627 - DNA, 122 bp, Homo sapiens
  misc_feature (61)..(62): /note="This region represents a CpG dinucleotide"
  misc_feature (61)..(61): /note="Nucleotide may be methylated to form 5-methylcytosine"
ggacttgctgtacaagggagtcgccgtcctctcttgtgttgaccgagattcctcagcaggcgggggcagagccggggaaaagcctggaatgggaaggggaggctcaggtgcacctgagggag

SEQ ID NO: 11628 - DNA, 122 bp, Homo sapiens
  misc_feature (61)..(62): /note="This region represents a CpG dinucleotide"
  misc_feature (61)..(61): /note="Nucleotide may be methylated to form 5-methylcytosine"
aagcaacatttaaaggactaggttagtttctgacactaagtgacctccatttgcatacttcgccatgttgtgtgttttatggttgccttaagatgactatgttttttggtagcattgctgtg

SEQ ID NO: 11629 - DNA, 122 bp, Homo sapiens
  misc_feature (61)..(62): /note="This region represents a CpG dinucleotide"
  misc_feature (61)..(61): /note="Nucleotide may be methylated to form 5-methylcytosine"
ctggacttggccccaaccacctgacctcgcctgaattgaggatagcgaagataaaggagacgagcctgggtctaggatatttagagtcaggacgaccatcctgcttactgactcattgggta

SEQ ID NO: 11630 - DNA, 122 bp, Homo sapiens
  misc_feature (61)..(62): /note="This region represents a CpG dinucleotide"
  misc_feature (61)..(61): /note="Nucleotide may be methylated to form 5-methylcytosine"
tgagtgaaagttcccagctcgtggaggagagaagagcagttctgtgggtttggccttagacgacaaaggctagggttcactgccccgtgcagacacagtccacaggcactgtcactctgaca

SEQ ID NO: 11631 - DNA, 122 bp, Homo sapiens
  misc_feature (61)..(62): /note="This region represents a CpG dinucleotide"
  misc_feature (61)..(61): /note="Nucleotide may be methylated to form 5-methylcytosine"
ttggcgctttcctaggcagaagtaagttgtaaaagtggccactgcccatacgctttcaaacgcctgcctggagggtggaagttacctggggagcatgctttggtttgcaaatctaccgtcag

SEQ ID NO: 11632 - DNA, 122 bp, Homo sapiens
  misc_feature (61)..(62): /note="This region represents a CpG dinucleotide"
  misc_feature (61)..(61): /note="Nucleotide may be methylated to form 5-methylcytosine"
aaacgttgatttccagagcagtcgtctgagattatggcccaggggtacatgtgacataagcggttgactagggaattacagattatgacagcactcttgagtagctgaaaagctaaaaatag

SEQ ID NO: 11633 - DNA, 122 bp, Homo sapiens
  misc_feature (61)..(62): /note="This region represents a CpG dinucleotide"
  misc_feature (61)..(61): /note="Nucleotide may be methylated to form 5-methylcytosine"
caaattatttaaaaagtgtttcaccctgctcagaagccagacctattgcttaaagctacacgccccaaatcttcacagacttcctgactgcttagaccagctgttagaaaactccagcctgt

SEQ ID NO: 11634 - DNA, 122 bp, Homo sapiens
  misc_feature (61)..(62): /note="This region represents a CpG dinucleotide"
  misc_feature (61)..(61): /note="Nucleotide may be methylated to form 5-methylcytosine"
cgtcaaagtgcttgagccacaacaacaacccctgaacgtgaggctgattaaagagggttacgtgaactgccgaattaagccgtccaaaattggataaagtgattgtgaaatctgttttgagt

SEQ ID NO: 11635 - DNA, 122 bp, Homo sapiens
  misc_feature (61)..(62): /note="This region represents a CpG dinucleotide"
  misc_feature (61)..(61): /note="Nucleotide may be methylated to form 5-methylcytosine"
gacttgtcctcctggctctgcttcaatgacaacaggccaagccctcatggtagaaggtgccgttcccaccaacctgggccttctgcccccgcaggccctctctgggcaaggtcagctggtgc

SEQ ID NO: 11636 - DNA, 122 bp, Homo sapiens
  misc_feature (61)..(62): /note="This region represents a CpG dinucleotide"
  misc_feature (61)..(61): /note="Nucleotide may be methylated to form 5-methylcytosine"
tcctgctccattgatgagccaatgaccttgctatcaactcagaagttgatcctgtcacctcgctcttacctcacctacaaaatgcactcagtcactaaggcctgctaatccaacctcttaaa

SEQ ID NO: 11637 - DNA, 122 bp, Homo sapiens
  misc_feature (61)..(62): /note="This region represents a CpG dinucleotide"
  misc_feature (61)..(61): /note="Nucleotide may be methylated to form 5-methylcytosine"
agttaacaacctggacagacaggcccatcatgtgtgttatgacctatctggtttcctactcgcatggttagaaggctcattttattgctttgaactctggaattaatcctgcttaaaggaga

SEQ ID NO: 11638 - DNA, 122 bp, Homo sapiens
  misc_feature (61)..(62): /note="This region represents a CpG dinucleotide"
  misc_feature (61)..(61): /note="Nucleotide may be methylated to form 5-methylcytosine"
ggtgaagagtaaatagatcaccaagtattttgaaagttaccttccttggccaggcacagtcgctcacgcctgtaatcccagcactttagaaagccaaggcgggaagatcacctgaacccagc

SEQ ID NO: 11639 - DNA, 122 bp, Homo sapiens
  misc_feature (61)..(62): /note="This region represents a CpG dinucleotide"
  misc_feature (61)..(61): /note="Nucleotide may be methylated to form 5-methylcytosine"
cacccaacctccctggccacctgcctagatgtcccatcctttagatctctgcttattcaccgccaacctccaccctctaggcagccttccctagtgctttagtctacggagagaaatggaag

SEQ ID NO: 11640 - DNA, 122 bp, Homo sapiens
  misc_feature (61)..(62): /note="This region represents a CpG dinucleotide"
  misc_feature (61)..(61): /note="Nucleotide may be methylated to form 5-methylcytosine"
gtcttaactgctcatttcttaaaatcttaagaaaaccccacaatttggacattttgcagacggaagtgagaaaaattcaatcattataatcatccctggtccccagccaaaaggaaagcttt

SEQ ID NO: 11641 - DNA, 122 bp, Homo sapiens
  misc_feature (61)..(62): /note="This region represents a CpG dinucleotide"
  misc_feature (61)..(61): /note="Nucleotide may be methylated to form 5-methylcytosine"
ggggcaggagaatatgaagttgtgccttatacacactcccttttcatacagtcaaatccacgcttagcattgccttttcatattagggtgtgtttggtctagatccaatggtgcctatggac

SEQ ID NO: 11642 - DNA, 122 bp, Homo sapiens
  misc_feature (61)..(62): /note="This region represents a CpG dinucleotide"
  misc_feature (61)..(61): /note="Nucleotide may be methylated to form 5-methylcytosine"
gcctcactgcctccagccctctcaagttaaacgaactgaactaggcctggtggaaggaggcgcactttcctcctggcagaatgctagctctgagccagttcagtacctggaggaggagcagg

SEQ ID NO: 11643 - DNA, 122 bp, Homo sapiens
  misc_feature (61)..(62): /note="This region represents a CpG dinucleotide"
  misc_feature (61)..(61): /note="Nucleotide may be methylated to form 5-methylcytosine"
tcacagacaagcccactaaagacagtctctcttcctttgtgtccaccctcagggaagaggcgtcctgccaaggcctggtcaggcaggagaaccaggctctgctgccaccgagtccctagccc

SEQ ID NO: 11644 - DNA, 122 bp, Homo sapiens
  misc_feature (61)..(62): /note="This region represents a CpG dinucleotide"
  misc_feature (61)..(61): /note="Nucleotide may be methylated to form 5-methylcytosine"
ccttcaaggctggttctgggtcccggaaccatcctttcctggttcaggctgggtgcaggccgtccagcaccacctctctgactcaaggctggaattagtggggaggtgagtgaggctcttgt

SEQ ID NO: 11645 - DNA, 122 bp, Homo sapiens
  misc_feature (61)..(62): /note="This region represents a CpG dinucleotide"
  misc_feature (61)..(61): /note="Nucleotide may be methylated to form 5-methylcytosine"
ccattataccctccacccttccgtctcttaggacttcctgtttttcatcatcattagccacgtggaaaggaaagacagtgtgtgcctatgaaaatactgacaaatcaagatgatttttcctt

SEQ ID NO: 11646 - DNA, 122 bp, Homo sapiens
  misc_feature (61)..(62): /note="This region represents a CpG dinucleotide"
  misc_feature (61)..(61): /note="Nucleotide may be methylated to form 5-methylcytosine"
acttttaggggaaggcctcggagagagcccgaggggttgtctatggcttcagtacctcaacgcaagaggacactgctgaccagctgcattggagtcacctggaagcttgttagaaatgcata

SEQ ID NO: 11647 - DNA, 122 bp, Homo sapiens
  misc_feature (61)..(62): /note="This region represents a CpG dinucleotide"
  misc_feature (61)..(61): /note="Nucleotide may be methylated to form 5-methylcytosine"
tcgaactcctgatctcaagtgatccgcccgcctcgcctcccaaagtgctgggattacaggcgtgagccacggcacccagcctgcttagctttttggtaaagcattatgagactaaaccaggg

SEQ ID NO: 11648 - DNA, 122 bp, Homo sapiens
  misc_feature (61)..(62): /note="This region represents a CpG dinucleotide"
  misc_feature (61)..(61): /note="Nucleotide may be methylated to form 5-methylcytosine"
cacccaaattgagaaacattgtcaaaaccactggcctctactcattacaaattctgaggtcgcaaatgacaaggaatgatgcaggaagtgccctggattaaagaagactaaggtcaggcgcg

SEQ ID NO: 11649 - DNA, 122 bp, Homo sapiens
  misc_feature (61)..(62): /note="This region represents a CpG dinucleotide"
  misc_feature (61)..(61): /note="Nucleotide may be methylated to form 5-methylcytosine"
ttacatgtgtgagccactgtacctggcctcaactcttgttaaaattaaagcaccttaatacgtttagcaaactcatcagaccaataaatattttcaagatgtatgcagaattaccagtggca

SEQ ID NO: 11650 - DNA, 122 bp, Homo sapiens
  misc_feature (61)..(62): /note="This region represents a CpG dinucleotide"
  misc_feature (61)..(61): /note="Nucleotide may be methylated to form 5-methylcytosine"
acaagactttgcagcagccactataaagtggcttcaagaatttacttgaacagtgtccatcgaaatgtgaatgtataccaaacagccagtgtggacttagactggaggacttagactggatt

SEQ ID NO: 11651 - DNA, 122 bp, Homo sapiens
  misc_feature (61)..(62): /note="This region represents a CpG dinucleotide"
  misc_feature (61)..(61): /note="Nucleotide may be methylated to form 5-methylcytosine"
gaaggtgagagaccatctctggggtccactctgtggggtgtggctgagatgctgtctagccgggcgacctgcctactttccagctgtgtggcttggggcaagttacttaacctctctgagtc

SEQ ID NO: 11652 - DNA, 122 bp, Homo sapiens
  misc_feature (61)..(62): /note="This region represents a CpG dinucleotide"
  misc_feature (61)..(61): /note="Nucleotide may be methylated to form 5-methylcytosine"
tgaagacagctgaatgttggtttgggcaacagggccctggagattgccttcctgaagacacggcagatcccaaagccagcttgtggggagcccaccggtgtggggtaaccaggttgcatcaa

SEQ ID NO: 11653 - DNA, 122 bp, Homo sapiens
  misc_feature (61)..(62): /note="This region represents a CpG dinucleotide"
  misc_feature (61)..(61): /note="Nucleotide may be methylated to form 5-methylcytosine"
aggccttgcacttggtactacagcaaagataagacagtccccaacctcagagagctcatacggtgaatcagtcacccaagaaccactccaggctatgcccctgagatgctcctaaactgatg

SEQ ID NO: 11654 - DNA, 122 bp, Homo sapiens
  misc_feature (61)..(62): /note="This region represents a CpG dinucleotide"
  misc_feature (61)..(61): /note="Nucleotide may be methylated to form 5-methylcytosine"
tgattctgtacttttgagtgcctctgcatggaagtgaaagaacttactcagcagaggcagcgtagcatagagagaagcttgtcagacatcttctgtcacaaacttgctatgtaagcttgggt

SEQ ID NO: 11655 - DNA, 122 bp, Homo sapiens
  misc_feature (61)..(62): /note="This region represents a CpG dinucleotide"
  misc_feature (61)..(61): /note="Nucleotide may be methylated to form 5-methylcytosine"
aaattatgtcatttaaacctccctgttgagtaacagacttgacttctctcaacagtcaatcggatccacaagatgaagaatgccattgtgtgagtacagatttgaaccctgttgctaatcac

SEQ ID NO: 11656 - DNA, 122 bp, Homo sapiens
  misc_feature (61)..(62): /note="This region represents a CpG dinucleotide"
  misc_feature (61)..(61): /note="Nucleotide may be methylated to form 5-methylcytosine"
tctcgtgctttttaatgactccacattggtcagcagatgctcagccaagtcggatgagaccgggttctgccttggtgtccgtgttgctagctggggcaggcaaaggcatgaacttgcaaagt

SEQ ID NO: 11657 - DNA, 122 bp, Homo sapiens
  misc_feature (61)..(62): /note="This region represents a CpG dinucleotide"
  misc_feature (61)..(61): /note="Nucleotide may be methylated to form 5-methylcytosine"
gaacacaaaactcagctgaagccatgactcctgactcaccgtgaaatcataaattcatatcgttttaagcagataagtttgtggtaatttgtcatgcagcaaaagaaaatgaattcagcata

SEQ ID NO: 11658 - DNA, 122 bp, Homo sapiens
  misc_feature (61)..(62): /note="This region represents a CpG dinucleotide"
  misc_feature (61)..(61): /note="Nucleotide may be methylated to form 5-methylcytosine"
actgacaccatgtatagttgtgccacagacctatcttgccagatatgcctctatttcagccgcagagtcaagttcataacaagttacctgactactacgttaaccaaaaaggaaatgggaat

SEQ ID NO: 11659 - DNA, 122 bp, Homo sapiens
  misc_feature (61)..(62): /note="This region represents a CpG dinucleotide"
  misc_feature (61)..(61): /note="Nucleotide may be methylated to form 5-methylcytosine"
ccaggcagtccttaatcctcacaacaaccttgagtggtaggatctatgattcccatttcacgtgatgaaaccgagcttcagagatgatggcttgccaagatcacacactaaatactgacata

SEQ ID NO: 11660 - DNA, 122 bp, Homo sapiens
  misc_feature (61)..(62): /note="This region represents a CpG dinucleotide"
  misc_feature (61)..(61): /note="Nucleotide may be methylated to form 5-methylcytosine"
ggcactggtgagagcacagtgggtgagtcagagccggccctgccgccgggccctcggccgcgcccctcccagccccattacctgccattacctgttggggccaaaggcgccgtggctgctga

SEQ ID NO: 11661 - DNA, 122 bp, Homo sapiens
  misc_feature (61)..(62): /note="This region represents a CpG dinucleotide"
  misc_feature (61)..(61): /note="Nucleotide may be methylated to form 5-methylcytosine"
ggtcatggagggaataaactggagagcgtttggtatgtgctcagtgtctgctccattgtgcgcactcagcctatggtcatttttaatttttaaatccagccccagggtgaggcttcccttgt

SEQ ID NO: 11662 - DNA, 122 bp, Homo sapiens
  misc_feature (61)..(62): /note="This region represents a CpG dinucleotide"
  misc_feature (61)..(61): /note="Nucleotide may be methylated to form 5-methylcytosine"
aacactttggatttatctaggatctttgagctgaataggtctcaagatcttccttcaggacgtgagaaaaatattttaccacctctatgaggcatgcccaacacaccgtctttagctcaaat

SEQ ID NO: 11663 - DNA, 122 bp, Homo sapiens
  misc_feature (61)..(62): /note="This region represents a CpG dinucleotide"
  misc_feature (61)..(61): /note="Nucleotide may be methylated to form 5-methylcytosine"
gactatggggattacatttcaagatgagatttgggtggggacacaaatcctaccatatcacgaggtgatctcactagatcctctagaagcctgagtgccttgcagggctagagaagggaaca

SEQ ID NO: 11664 - DNA, 122 bp, Homo sapiens
  misc_feature (61)..(62): /note="This region represents a CpG dinucleotide"
  misc_feature (61)..(61): /note="Nucleotide may be methylated to form 5-methylcytosine"
atgtgtggcagatcatcacccctggggcttagctttgggatttcctaaatctcagagcaacgtaagcacaacggccccactttgcatacctgaactcaaaactgaacaaaatcatactgggc

SEQ ID NO: 11665 - DNA, 122 bp, Homo sapiens
  misc_feature (61)..(62): /note="This region represents a CpG dinucleotide"
  misc_feature (61)..(61): /note="Nucleotide may be methylated to form 5-methylcytosine"
acaaatttattttagtgctgtgataatacttgggatgagctatttatcccatcttgactccgtctcatggggtaatgatttttgcacaggaacggttaatccagttgaaaatcatcacctcc

SEQ ID NO: 11666 - DNA, 122 bp, Homo sapiens
  misc_feature (61)..(62): /note="This region represents a CpG dinucleotide"
  misc_feature (61)..(61): /note="Nucleotide may be methylated to form 5-methylcytosine"
aggtcaccagggcctcaacaagagctgtgtcatcagggctgggatactagcaggggcaaacgaggcactggcttcaggacaacatgtgagggggtgctcaaaaagtcagtcatcaagataga

SEQ ID NO: 11667 - DNA, 122 bp, Homo sapiens
  misc_feature (61)..(62): /note="This region represents a CpG dinucleotide"
  misc_feature (61)..(61): /note="Nucleotide may be methylated to form 5-methylcytosine"
ataaagttcttttgagctgacggaaatgccgatgcagctttttataactggaatactgaccgtcagcaaaacagagattgggtggctcaaacagagcccttattacatctgattcactgatc

SEQ ID NO: 11668 - DNA, 122 bp, Homo sapiens
  misc_feature (61)..(62): /note="This region represents a CpG dinucleotide"
  misc_feature (61)..(61): /note="Nucleotide may be methylated to form 5-methylcytosine"
ggggaagatgggtgagaggaaaaccagctcaactggaagaccaggggaaggaactaacagcgctttgggccccgctctgcagaaggctagatcaatgcacaagtgcatgcacgtatactatt

SEQ ID NO: 11669 - DNA, 122 bp, Homo sapiens
  misc_feature (61)..(62): /note="This region represents a CpG dinucleotide"
  misc_feature (61)..(61): /note="Nucleotide may be methylated to form 5-methylcytosine"
atgatgagcaactgttggcaaagttctgagcaaaacaaagtataatcttccctcaatatacgtgatggttttgtttctggaaaatttattatgtcataagatgattttaagaacaccttgtt

SEQ ID NO: 11670 - DNA, 122 bp, Homo sapiens
  misc_feature (61)..(62): /note="This region represents a CpG dinucleotide"
  misc_feature (61)..(61): /note="Nucleotide may be methylated to form 5-methylcytosine"
tcaagaacttgttcccaaaccagtggtgtcaagtaaaaattgcagaggagtggcaatgtgcgaaggtttcccaggtggcctggagactgcagacttaatgcttatgaaatggaagtctatag

SEQ ID NO: 11671 - DNA, 122 bp, Homo sapiens
  misc_feature (61)..(62): /note="This region represents a CpG dinucleotide"
  misc_feature (61)..(61): /note="Nucleotide may be methylated to form 5-methylcytosine"
ttgtgcagtgcttggattgtcatattaaagataaagtatgttaatttaaagtgacaggaacgaaatcattctgaagggagcagggcaaggacatatgcatcatgcgctgaacctttgttcct

SEQ ID NO: 11672 - DNA, 122 bp, Homo sapiens
  misc_feature (61)..(62): /note="This region represents a CpG dinucleotide"
  misc_feature (61)..(61): /note="Nucleotide may be methylated to form 5-methylcytosine"
cttccttaaaactattctcaatcctgcagccaaagtgatcctattaaaacataaatcagacgtcactcttttcctcaatgccatccaatggcttcccatctcactcagagtcaaaaccaagg

SEQ ID NO: 11673 - DNA, 122 bp, Homo sapiens
  misc_feature (61)..(62): /note="This region represents a CpG dinucleotide"
  misc_feature (61)..(61): /note="Nucleotide may be methylated to form 5-methylcytosine"
tctcctggacagacaggccatgctggttggccaacacacgtattttaactatgtggccgacgtgtttgccactcactctgtggttaaaatgtaaacagaaggtcaaaaggtaggatcacagg

SEQ ID NO: 11674 - DNA, 122 bp, Homo sapiens
  misc_feature (61)..(62): /note="This region represents a CpG dinucleotide"
  misc_feature (61)..(61): /note="Nucleotide may be methylated to form 5-methylcytosine"
ggcttcagcctccaaggaggtatagcagtggccaggtctcatcctgtgctagtccagggccgtgctcaggaatcacatttgttaccgtgctgtgagtctagggagagggccagagggcacca

SEQ ID NO: 11675 - DNA, 122 bp, Homo sapiens
  misc_feature (61)..(62): /note="This region represents a CpG dinucleotide"
  misc_feature (61)..(61): /note="Nucleotide may be methylated to form 5-methylcytosine"
acagcccccggggaaggtcttcatacagacttgagggtgtgcgtgctggtccctgccctccgccgcagcggggctgggactcagcagtcgggtcccggagctgcctttggtgcgcacgggcg

SEQ ID NO: 11676 - DNA, 122 bp, Homo sapiens
  misc_feature (61)..(62): /note="This region represents a CpG dinucleotide"
  misc_feature (61)..(61): /note="Nucleotide may be methylated to form 5-methylcytosine"
ctccaccatgttatgatgcaacatgagacactcaccagaagctgaccagatgggctgccccgtcttggactttccagcctctagaataatgagctaaataaaccacttttctttacaaatta

SEQ ID NO: 11677 - DNA, 122 bp, Homo sapiens
  misc_feature (61)..(62): /note="This region represents a CpG dinucleotide"
  misc_feature (61)..(61): /note="Nucleotide may be methylated to form 5-methylcytosine"
tcccaatcagctgctctcagtgtctaggtacaattgcagcccattcatggcatatgcatgcgtctgccaagtatgctgggaagctcagaaaacagtataaagaatactatggaaacagacag

SEQ ID NO: 11678 - DNA, 122 bp, Homo sapiens
  misc_feature (61)..(62): /note="This region represents a CpG dinucleotide"
  misc_feature (61)..(61): /note="Nucleotide may be methylated to form 5-methylcytosine"
ctcaggtgatctgcccgcctgggcctctcaaagtgctgggattacagacatgagccaccacgcccggccctagctcccaattatttaacatgcttaaaggagattaaaattcttttctatta

SEQ ID NO: 11679 - DNA, 122 bp, Homo sapiens
  misc_feature (61)..(62): /note="This region represents a CpG dinucleotide"
  misc_feature (61)..(61): /note="Nucleotide may be methylated to form 5-methylcytosine"
gtcagagattaagttctattgctaattttatgcaaggctttataaaatcacttaccttcccgtatagttcaatttttccatctttaaaatgaatacaatatatgtctagctcagagcgatgt

SEQ ID NO: 11680 - DNA, 122 bp, Homo sapiens
  misc_feature (61)..(62): /note="This region represents a CpG dinucleotide"
  misc_feature (61)..(61): /note="Nucleotide may be methylated to form 5-methylcytosine"
gaaactacatttttgttttgattaatttaaatagccatacagttgctaccatactggtcacggcagctgtagactgactgggtccatagttcatcacctcaaaattctttcaaaatttatta

SEQ ID NO: 11681 - DNA, 122 bp, Homo sapiens
  misc_feature (61)..(62): /note="This region represents a CpG dinucleotide"
  misc_feature (61)..(61): /note="Nucleotide may be methylated to form 5-methylcytosine"
gcgcgcccctgctccggcgccgggagtagctggctgtagggatcagccgagcgaggtggccgagtccataaacacgggccatttagcaattacccccagggcgtgataattgcgctgggcag

SEQ ID NO: 11682 - DNA, 122 bp, Homo sapiens
  misc_feature (61)..(62): /note="This region represents a CpG dinucleotide"
  misc_feature (61)..(61): /note="Nucleotide may be methylated to form 5-methylcytosine"
aaaaccatctctttaatctcttaacactgctttatcttttttccctatacttatcactaccgctgtgatatttataattatttcctgatgctctgtcttcccttctaaattgtaaactacat

SEQ ID NO: 11683 - DNA, 122 bp, Homo sapiens
  misc_feature (61)..(62): /note="This region represents a CpG dinucleotide"
  misc_feature (61)..(61): /note="Nucleotide may be methylated to form 5-methylcytosine"
tgtcaatggaagaggtgtgaccattcagccacttaaagaggattatggtgttcagctggtcgaaaaggccgcagacacctttcaggtgaaagttaatattgggccgggcgcggtggctcaca

SEQ ID NO: 11684 - DNA, 122 bp, Homo sapiens
  misc_feature (61)..(62): /note="This region represents a CpG dinucleotide"
  misc_feature (61)..(61): /note="Nucleotide may be methylated to form 5-methylcytosine"
gtcctggggctgagatggaacaggtcaggatggatgggacaggacccacagactggatgccgcagggacagacctggtaagtgacttatgtgggagggaggggccaaactgctgtagggggc

SEQ ID NO: 11685 - DNA, 122 bp, Homo sapiens
  misc_feature (61)..(62): /note="This region represents a CpG dinucleotide"
  misc_feature (61)..(61): /note="Nucleotide may be methylated to form 5-methylcytosine"
cttttcgagcaacagagtagaacaggttcttcttggcttaggctggagtcctcgaagctccgtgctgtgggaagtgacaactgagcacccctttgctgtccctgccctgctcagagccctag

SEQ ID NO: 11686 - DNA, 122 bp, Homo sapiens
  misc_feature (61)..(62): /note="This region represents a CpG dinucleotide"
  misc_feature (61)..(61): /note="Nucleotide may be methylated to form 5-methylcytosine"
agctgttctgggggtggagggtggagagggattccagattaagttctcattgcttcatcacgtaaaagaatctcagagacgagtttacatttagcttacatgagcacaccgaggagatctgt

SEQ ID NO: 11687 - DNA, 122 bp, Homo sapiens
  misc_feature (61)..(62): /note="This region represents a CpG dinucleotide"
  misc_feature (61)..(61): /note="Nucleotide may be methylated to form 5-methylcytosine"
ccagatttgctctttccctttgcaattgattttaattgtgttgtcaggtaacattagacacgaatgagaaaccgatcttcaaagacaggataggcctgaagaggcagtagtgtaaggaagtg

SEQ ID NO: 11688 - DNA, 122 bp, Homo sapiens
  misc_feature (61)..(62): /note="This region represents a CpG dinucleotide"
  misc_feature (61)..(61): /note="Nucleotide may be methylated to form 5-methylcytosine"
gaaaattaggattcttaatggatttcttagctgagacgcctcaactttgccctgaaacagcgtcagcaccctggttttagatccaaatgttacttccaggtatcaccaataatcaaattaag

SEQ ID NO: 11689 - DNA, 122 bp, Homo sapiens
  misc_feature (61)..(62): /note="This region represents a CpG dinucleotide"
  misc_feature (61)..(61): /note="Nucleotide may be methylated to form 5-methylcytosine"
cacctacaattttaattttttttttttttacattctgctttgggtggattaagtatgttacggaaaagtagctagtcctggggaaggtgtttgaataacaattagccaacttaataatggcc

SEQ ID NO: 11690 - DNA, 122 bp, Homo sapiens
  misc_feature (61)..(62): /note="This region represents a CpG dinucleotide"
  misc_feature (61)..(61): /note="Nucleotide may be methylated to form 5-methylcytosine"
ctgaagtcttcagggcagccagtttatggttcactatgttaatttcacctgcctccctctcgtctccgtttcccctttcctataatcctggtactcaccgctttgctgtccatagtattttc

SEQ ID NO: 11691 - DNA, 122 bp, Homo sapiens
  misc_feature (61)..(62): /note="This region represents a CpG dinucleotide"
  misc_feature (61)..(61): /note="Nucleotide may be methylated to form 5-methylcytosine"
ttaacatcaacacagaccttaagactgatagaacagcctctttaagtctcacagactatccggtagtgtgataatgatgagaaacatttgcagtctattctctgaagcctgctacaggctcc

SEQ ID NO: 11692 - DNA, 122 bp, Homo sapiens
  misc_feature (61)..(62): /note="This region represents a CpG dinucleotide"
  misc_feature (61)..(61): /note="Nucleotide may be methylated to form 5-methylcytosine"
gcacacctcatgcctaagtcatgaccacacaactgtaagagtataacacattatccatcacgtctcctaaaaaattcaccctcagtattctgtaggatcctcttatcaatgggtttcacttt

SEQ ID NO: 11693 - DNA, 122 bp, Homo sapiens
  misc_feature (61)..(62): /note="This region represents a CpG dinucleotide"
  misc_feature (61)..(61): /note="Nucleotide may be methylated to form 5-methylcytosine"
tagttgtctaatgacaacccctgaggctattgcttcactcttgtttatattgctcagttccgtcagtttagaagacattaaaaagcagaactgagttggctgttttacgttagtggtgaact

SEQ ID NO: 11694 - DNA, 122 bp, Homo sapiens
  misc_feature (61)..(62): /note="This region represents a CpG dinucleotide"
  misc_feature (61)..(61): /note="Nucleotide may be methylated to form 5-methylcytosine"
ggttggaatcctgactcttcctaactatgggaactacgactagttacttctctggggcctcgatgttttgtagagtcagcatgacagtttctctctcatagggttgttgagaggattaaact

SEQ ID NO: 11695 - DNA, 122 bp, Homo sapiens
  misc_feature (61)..(62): /note="This region represents a CpG dinucleotide"
  misc_feature (61)..(61): /note="Nucleotide may be methylated to form 5-methylcytosine"
gtatgatattagtcatacgtgtgcgaggcagtggtgacagcctagggaggcagttctgctcggggggatactttggtatgtaggggttacctaagctgagtctttttctcctgagtcttcag

SEQ ID NO: 11696 - DNA, 122 bp, Homo sapiens
  misc_feature (61)..(62): /note="This region represents a CpG dinucleotide"
  misc_feature (61)..(61): /note="Nucleotide may be methylated to form 5-methylcytosine"
ttccgctagaaaactaaatgagagcacgcctgatgggttggtgtcctcacttccagtcaccgccccctttccaatggaatccgacactgaagcataagttgaatgtggcatttcccttcagc

SEQ ID NO: 11697 - DNA, 122 bp, Homo sapiens
  misc_feature (61)..(62): /note="This region represents a CpG dinucleotide"
  misc_feature (61)..(61): /note="Nucleotide may be methylated to form 5-methylcytosine"
gagaagagacccctaggcagtttgcattggcctgtgctgtccgggtgtggtcctggtgtccgtccacatgttgatggcgtgtcgggctgggggctttctgcagccttccctgttccactgtc

SEQ ID NO: 11698 - DNA, 122 bp, Homo sapiens
  misc_feature (61)..(62): /note="This region represents a CpG dinucleotide"
  misc_feature (61)..(61): /note="Nucleotide may be methylated to form 5-methylcytosine"
atatctaaacaccgcatggttaatcctgaacatctacttcctgagcgattcaaccagttacgctctgagctccacaatcaataaaatgtactggagtcttgaatccattgaagtgctttaaa

SEQ ID NO: 11699 - DNA, 122 bp, Homo sapiens
  misc_feature (61)..(62): /note="This region represents a CpG dinucleotide"
  misc_feature (61)..(61): /note="Nucleotide may be methylated to form 5-methylcytosine"
aggccccatgtagctgtccccacattggggtttgctttctacttcccaggtgtttctcagcgtgagagtttagtttgctttgtgctgctggacaggttcctgcagaatggcctgttgtacga

SEQ ID NO: 11700 - DNA, 122 bp, Homo sapiens
  misc_feature (61)..(62): /note="This region represents a CpG dinucleotide"
  misc_feature (61)..(61): /note="Nucleotide may be methylated to form 5-methylcytosine"
gttaggttgtactgtaaacacccgacagaaaccacaaaggggaatgcacaactcactatgcgccaggtaagggctttgcatctgtctcatttaatcctcccccaagctctgtgaggtaggta

SEQ ID NO: 11701 - DNA, 122 bp, Homo sapiens
  misc_feature (61)..(62): /note="This region represents a CpG dinucleotide"
  misc_feature (61)..(61): /note="Nucleotide may be methylated to form 5-methylcytosine"
ccctccctggcccttcctggcgctccctggccctccctggcactccctggcactccctggcgttcctggcttgctgctgcagcacttcagtggcttcagtcacactgcgttctccctgtgcg

SEQ ID NO: 11702 - DNA, 122 bp, Homo sapiens
  misc_feature (61)..(62): /note="This region represents a CpG dinucleotide"
  misc_feature (61)..(61): /note="Nucleotide may be methylated to form 5-methylcytosine"
ggacaatggcagtcagccaaggcaggaaaggagaaagtgtatcctgggtggagggccctgcgtgttcacaggcatggaggtgtgaaagaacacagcctcctaatcgctcccttcagtctgtc

SEQ ID NO: 11703 - DNA, 122 bp, Homo sapiens
  misc_feature (61)..(62): /note="This region represents a CpG dinucleotide"
  misc_feature (61)..(61): /note="Nucleotide may be methylated to form 5-methylcytosine"
agtaaaaaatagacttatgtttttagttttagctatgtatattgagaaactgtggccctacggtggctgttagggattagtggattaggttgtttttaaataagacatttcagtttagtatc

SEQ ID NO: 11704 - DNA, 122 bp, Homo sapiens
  misc_feature (61)..(62): /note="This region represents a CpG dinucleotide"
  misc_feature (61)..(61): /note="Nucleotide may be methylated to form 5-methylcytosine"
acacagaggaaactccccctcccagccctaccccaagcacatccttgcttctctcagtcacgccagttacaccaacaggggcagctctggggaggacatttggaaaatagtcaagagagggt

SEQ ID NO: 11705 - DNA, 122 bp, Homo sapiens
  misc_feature (61)..(62): /note="This region represents a CpG dinucleotide"
  misc_feature (61)..(61): /note="Nucleotide may be methylated to form 5-methylcytosine"
atataagtcatcaggtaattatacaaagtaagaatatgggagcagcattatggaaggaggcggagccaatgaatttgctgatctgtgcattgcagactgaatatgttcccctagaactgagt

SEQ ID NO: 11706 - DNA, 122 bp, Homo sapiens
  misc_feature (61)..(62): /note="This region represents a CpG dinucleotide"
  misc_feature (61)..(61): /note="Nucleotide may be methylated to form 5-methylcytosine"
ccttaggattataatttcactagagtatgcaaatcatagcagacatcatggccattctatcgtgtggaacagaaaactctttgagtaatgaagatgattcataggaaccatagaacttaatc

SEQ ID NO: 11707 - DNA, 122 bp, Homo sapiens
  misc_feature (61)..(62): /note="This region represents a CpG dinucleotide"
  misc_feature (61)..(61): /note="Nucleotide may be methylated to form 5-methylcytosine"
gggaagggaactgctgacataaacgaaattccatttgttcatttgttcattcaacaaacccgagtgcctggtacaatactggttgctgatgcaatactaggatccaactatgagtaaggtgg

SEQ ID NO: 11708 - DNA, 122 bp, Homo sapiens
  misc_feature (61)..(62): /note="This region represents a CpG dinucleotide"
  misc_feature (61)..(61): /note="Nucleotide may be methylated to form 5-methylcytosine"
tgtgggttagtggggagcggtgcagccatgctgatcgggagtctgcactggcacagctggcggcctgcacagcaccctcatcggaaagtgatccatcacccgacagtcgtgttgccatccag

SEQ ID NO: 11709 - DNA, 122 bp, Homo sapiens
  misc_feature (61)..(62): /note="This region represents a CpG dinucleotide"
  misc_feature (61)..(61): /note="Nucleotide may be methylated to form 5-methylcytosine"
catgtagaaagagtgtcatggaatttcctttacggaaatgaaagtgctccgtatttctatcgctgtgcttttcataatggcaaatgattctgctgatggaatggctttctgagtgtataggt

SEQ ID NO: 11710 - DNA, 122 bp, Homo sapiens
  misc_feature (61)..(62): /note="This region represents a CpG dinucleotide"
  misc_feature (61)..(61): /note="Nucleotide may be methylated to form 5-methylcytosine"
atgggaggaggacaacgggagtaggcagcgagtgtgtctgttccccaggccccgccgtggcgggcatcctctccatccagaacatgacgacattgctggccaatgcctccttgaacctgcat

SEQ ID NO: 11711 - DNA, 122 bp, Homo sapiens
  misc_feature (61)..(62): /note="This region represents a CpG dinucleotide"
  misc_feature (61)..(61): /note="Nucleotide may be methylated to form 5-methylcytosine"
ttttcaaagaggacttcaaaggggctcaagataatagaaatctgggacttcggcatctttcgtcacaggaatgatagaccaactactatcaatcaccatttgctgaagaaatatttacaaat

SEQ ID NO: 11712 - DNA, 122 bp, Homo sapiens
  misc_feature (61)..(62): /note="This region represents a CpG dinucleotide"
  misc_feature (61)..(61): /note="Nucleotide may be methylated to form 5-methylcytosine"
ggctgcggagttggagcctcggaggaattccacggcagggatagatcacagcatacggaacgggactggttccatccaaagagtgaaccacaatgcttttggaaagcagtatggaaaaatgg

SEQ ID NO: 11713 - DNA, 122 bp, Homo sapiens
  misc_feature (61)..(62): /note="This region represents a CpG dinucleotide"
  misc_feature (61)..(61): /note="Nucleotide may be methylated to form 5-methylcytosine"
gacaggtcttggtggccctgcctggttcttgccattgctctgaggtgagatatctggacacgtaaggtgtcactgtgattgtgtgggtgtcggtggggcagggctagaaggcaagcctggtg

SEQ ID NO: 11714 - DNA, 122 bp, Homo sapiens
  misc_feature (61)..(62): /note="This region represents a CpG dinucleotide"
  misc_feature (61)..(61): /note="Nucleotide may be methylated to form 5-methylcytosine"
tggtcgagctttgtgaactttgtcttcatgccccgacaccctacttcccaaagcctggaccggtaaagttcttttcaccagaaaggacaagggcaagtgagtgcaagagagaaagtggcaca

SEQ ID NO: 11715 - DNA, 122 bp, Homo sapiens
  misc_feature (61)..(62): /note="This region represents a CpG dinucleotide"
  misc_feature (61)..(61): /note="Nucleotide may be methylated to form 5-methylcytosine"
tgtaccaggcggggttctgaatgcttccacgtcccaatttcaatcacttctgcaaggtgacgcagctaggaaagatgtgactcaggccactctggcatccaggactcacctcctcttctgac

SEQ ID NO: 11716 - DNA, 122 bp, Homo sapiens
  misc_feature (61)..(62): /note="This region represents a CpG dinucleotide"
  misc_feature (61)..(61): /note="Nucleotide may be methylated to form 5-methylcytosine"
gaacagctgtggggaagtggaggcagaaggcttggtgacaggttggatgtaagcactgtccgggatggaggagacttacactggctcttttttgaacagtggtgagatcccagccttttcat

SEQ ID NO: 11717 - DNA, 122 bp, Homo sapiens
  misc_feature (61)..(62): /note="This region represents a CpG dinucleotide"
  misc_feature (61)..(61): /note="Nucleotide may be methylated to form 5-methylcytosine"
aggtattcagtgtatacgaacatatcaacctgtttcataaaaagaatttgcgcctcttcacgaatgactcgctcaggtaaaagttactctgagtaaagtcagcattcacttgtatctgtgtc

SEQ ID NO: 11718 - DNA, 122 bp, Homo sapiens
  misc_feature (61)..(62): /note="This region represents a CpG dinucleotide"
  misc_feature (61)..(61): /note="Nucleotide may be methylated to form 5-methylcytosine"
gttactcatggaatctgctcttcacaaatccattgtattatgacataaaatatggctagacgccaaggtttaaccatacataaaaatactaattctcggctgggtgcactggcttatgcctg

SEQ ID NO: 11719 - DNA, 122 bp, Homo sapiens
  misc_feature (61)..(62): /note="This region represents a CpG dinucleotide"
  misc_feature (61)..(61): /note="Nucleotide may be methylated to form 5-methylcytosine"
ccattttacatgtatacatgtttgtgtgattctttgatccatttcccctttacagattcacgcctggttacattccccatacttttaatcaatttttccctttcctggggaaaaagatgaaa

SEQ ID NO: 11720 - DNA, 122 bp, Homo sapiens
  misc_feature (61)..(62): /note="This region represents a CpG dinucleotide"
  misc_feature (61)..(61): /note="Nucleotide may be methylated to form 5-methylcytosine"
cagtttacctcagatatttgctgctcaaataccatcttctgtgtgtatcacaacatgacacgcctacgaagaatgctgagctaggatttctagatgtactgttacatggtgatttactggtc

SEQ ID NO: 11721 - DNA, 122 bp, Homo sapiens
  misc_feature (61)..(62): /note="This region represents a CpG dinucleotide"
  misc_feature (61)..(61): /note="Nucleotide may be methylated to form 5-methylcytosine"
tttatgggcaggcgggttccccacctctatcatgaactcagagctgtggccatggtaccgcgtgctgctcttgtgagtcactctcccgtgccgcctaattgcccagacctggggacccgcag

SEQ ID NO: 11722 - DNA, 122 bp, Homo sapiens
  misc_feature (61)..(62): /note="This region represents a CpG dinucleotide"
  misc_feature (61)..(61): /note="Nucleotide may be methylated to form 5-methylcytosine"
agaacaaagatttgggcacatctctaacacacttctggactcatatatatgaagtgactacgtaacaagaagggctgtattgaggttatgtgatgtgaattaagcaagcaaaatctgcatgc

SEQ ID NO: 11723 - DNA, 122 bp, Homo sapiens
  misc_feature (61)..(62): /note="This region represents a CpG dinucleotide"
  misc_feature (61)..(61): /note="Nucleotide may be methylated to form 5-methylcytosine"
tgtaaagtgaagataataatacctccctcatagagttgttgtgaggactacatgggctaacgatcagacagaaagcactcattaagtgtgactagcattgttaattgcagtaatagtagttc

SEQ ID NO: 11724 - DNA, 122 bp, Homo sapiens
  misc_feature (61)..(62): /note="This region represents a CpG dinucleotide"
  misc_feature (61)..(61): /note="Nucleotide may be methylated to form 5-methylcytosine"
ttacagggatggtgcggtagataagggctagagcaggctgctaggaactctgggaagctacgaaaagtgttaggccagattagcatgatgagatttgcatttttaaagattattcctaccca

SEQ ID NO: 11725 - DNA, 122 bp, Homo sapiens
  misc_feature (61)..(62): /note="This region represents a CpG dinucleotide"
  misc_feature (61)..(61): /note="Nucleotide may be methylated to form 5-methylcytosine"
gcccttgtgaagacctttctgactcaagtgactgtggctctgacaggagtatctttccttcgtctgctgaatcatctttcacttcacagccctgcactggggctgtggtgcccacacaatgg

SEQ ID NO: 11726 - DNA, 122 bp, Homo sapiens
  misc_feature (61)..(62): /note="This region represents a CpG dinucleotide"
  misc_feature (61)..(61): /note="Nucleotide may be methylated to form 5-methylcytosine"
cctattcctccttcactttgaggccatttaaccctgtaaatctcattgtcacttagtagtcgctttatctggacttgactatataaacatctgtaagtaatgcattcagaaaacaggttttg

SEQ ID NO: 11727 - DNA, 122 bp, Homo sapiens
  misc_feature (61)..(62): /note="This region represents a CpG dinucleotide"
  misc_feature (61)..(61): /note="Nucleotide may be methylated to form 5-methylcytosine"
ccaatcgtgttttcccgaattaaaaagcttttgctggctgtacatcttcacagaatataccgaatgaaattataggttctgaccctgctgaccttccagcctttactttcaccacttgcctc

SEQ ID NO: 11728 - DNA, 122 bp, Homo sapiens
  misc_feature (61)..(62): /note="This region represents a CpG dinucleotide"
  misc_feature (61)..(61): /note="Nucleotide may be methylated to form 5-methylcytosine"
aggaaaactcagacagatggaccaatgtggacagatggccaggctggtggcccaacaaagcgagagctgccctgcccctcctcggtgaatgtgctgcgcctgacctcctccctaggctcagg

SEQ ID NO: 11729 - DNA, 122 bp, Homo sapiens
  misc_feature (61)..(62): /note="This region represents a CpG dinucleotide"
  misc_feature (61)..(61): /note="Nucleotide may be methylated to form 5-methylcytosine"
cctgcttcaagtgaatctttctgtgataaatttatagaacaactggtgtgacagtttttgcgcctgcctaataaatgtttgtatctgtgcatgagtcagtctgagacttgcttttattacaa

SEQ ID NO: 11730 - DNA, 122 bp, Homo sapiens
  misc_feature (61)..(62): /note="This region represents a CpG dinucleotide"
  misc_feature (61)..(61): /note="Nucleotide may be methylated to form 5-methylcytosine"
taactcctttgagaccagatacagtcatgggactatattctcaaaaagggaatgtgaatacggtacaactcctggatcctttgcttaaaatgaaactgatgctctgaatctggtttctctta

SEQ ID NO: 11731 - DNA, 122 bp, Homo sapiens
  misc_feature (61)..(62): /note="This region represents a CpG dinucleotide"
  misc_feature (61)..(61): /note="Nucleotide may be methylated to form 5-methylcytosine"
taatgcaactctgcctcttgtccctatcatcttcagcaactagtcaacatttaagccttgcgcatcaacaataatctcataatctctctcccacacacgcacacctccatgcttcctcctct

SEQ ID NO: 11732 - DNA, 122 bp, Homo sapiens
  misc_feature (61)..(62): /note="This region represents a CpG dinucleotide"
  misc_feature (61)..(61): /note="Nucleotide may be methylated to form 5-methylcytosine"
atgtcggcatgggtagtaggctgaatcataatccccaaagactttggatcctaatcccttcgtatcagtgaatgttactttatatggaaaaaaaggtcatagcagatgtgattaaggatctt

SEQ ID NO: 11733 - DNA, 122 bp, Homo sapiens
  misc_feature (61)..(62): /note="This region represents a CpG dinucleotide"
  misc_feature (61)..(61): /note="Nucleotide may be methylated to form 5-methylcytosine"
gcactttgccacaccatatgggtggggaccatacatgatcgcttccagtctcatgccaaacgtggcacagaaacttcattccttatttttattttctgattttcctccacaacttgagatcc

SEQ ID NO: 11734 - DNA, 122 bp, Homo sapiens
  misc_feature (61)..(62): /note="This region represents a CpG dinucleotide"
  misc_feature (61)..(61): /note="Nucleotide may be methylated to form 5-methylcytosine"
atactaaactcacaagttgttgtaaggattaaacaagaaaatacatttacatttttgagacggtgcttggcagatagcacatgctcaataaatggtagctattattattaacattgtatgag

SEQ ID NO: 11735 - DNA, 122 bp, Homo sapiens
  misc_feature (61)..(62): /note="This region represents a CpG dinucleotide"
  misc_feature (61)..(61): /note="Nucleotide may be methylated to form 5-methylcytosine"
gtggctcccctgggtccaggccaggcccagcaggagcaggagcagagcagaggcagtggccggcttcatgttcatgtgcttgtggaggccccagccctcggcctcggcttttatgctaggga

SEQ ID NO: 11736 - DNA, 122 bp, Homo sapiens
  misc_feature (61)..(62): /note="This region represents a CpG dinucleotide"
  misc_feature (61)..(61): /note="Nucleotide may be methylated to form 5-methylcytosine"
gtagatcctagagagaaggtctagtgtggtgattaatggtgactttccagagctcagccacgtgggtttcattctcagtgctgccacctgccagctccaatgtgactatgaacatgtcactt

SEQ ID NO: 11737 - DNA, 122 bp, Homo sapiens
  misc_feature (61)..(62): /note="This region represents a CpG dinucleotide"
  misc_feature (61)..(61): /note="Nucleotide may be methylated to form 5-methylcytosine"
caacttttctcaatcttacaaaattgttcttccaaatcatttaggtaatgtacactctcacgagcagcttatgggcagcttaagtaatcccatggagttactgaagtattaccaaggtatct

SEQ ID NO: 11738 - DNA, 122 bp, Homo sapiens
  misc_feature (61)..(62): /note="This region represents a CpG dinucleotide"
  misc_feature (61)..(61): /note="Nucleotide may be methylated to form 5-methylcytosine"
gtgaaacgacttcaaccctctcatttcacagataaagaaactgaggtcgagagggttaaacgacttgctggagcttaaatggcttagaagcagaaactgtgttccttgtatggattttgctt

SEQ ID NO: 11739 - DNA, 122 bp, Homo sapiens
  misc_feature (61)..(62): /note="This region represents a CpG dinucleotide"
  misc_feature (61)..(61): /note="Nucleotide may be methylated to form 5-methylcytosine"
cccaaaaccatgaagaagcttgatcatttacattagccgcatctgtaacattgcctggcacgaaatcctgggccaaaatggagataattggaattatgcaatactcagcgcttcagtttggc

SEQ ID NO: 11740 - DNA, 122 bp, Homo sapiens
  misc_feature (61)..(62): /note="This region represents a CpG dinucleotide"
  misc_feature (61)..(61): /note="Nucleotide may be methylated to form 5-methylcytosine"
tgcttgtgtaggtccaccacagggagccttcgatgcggaccttctgggttttgatctcctcgatgtccttaaattcactctttatctcccccttgatgaacttcctcttcttctcatgtctc

SEQ ID NO: 11741 - DNA, 122 bp, Homo sapiens
  misc_feature (61)..(62): /note="This region represents a CpG dinucleotide"
  misc_feature (61)..(61): /note="Nucleotide may be methylated to form 5-methylcytosine"
ctgggaaaagttgtctatgcccagaagccagcatcaggcaaagttgcccaagacctgctccgccagccccttgcagctgggctgggcttccaggagcagacgcccggtgtcgcactgcagga

SEQ ID NO: 11742 - DNA, 122 bp, Homo sapiens
  misc_feature (61)..(62): /note="This region represents a CpG dinucleotide"
  misc_feature (61)..(61): /note="Nucleotide may be methylated to form 5-methylcytosine"
gtcatgagaagactgagatggggacagtgtccctgactcagggaacagctcgtgccaagtcggatgagatacttgggtgtggctgcagtttagggcttgcacatgggcagctcagtactggg

SEQ ID NO: 11743 - DNA, 122 bp, Homo sapiens
  misc_feature (61)..(62): /note="This region represents a CpG dinucleotide"
  misc_feature (61)..(61): /note="Nucleotide may be methylated to form 5-methylcytosine"
ttagacaaaacagtcctgtaatcataggcttaagcttcttaaacacagcacatacagccacggccaggaaaaataaaaccagaagctagagtcgaggtgggagttagtccatcctgctagtc

SEQ ID NO: 11744 - DNA, 122 bp, Homo sapiens
  misc_feature (61)..(62): /note="This region represents a CpG dinucleotide"
  misc_feature (61)..(61): /note="Nucleotide may be methylated to form 5-methylcytosine"
gccttgccttttccagttgacccaggttcagataatgacaagatgacttcttagcccagtcgctctcaaactagctgacaccagcatagcctggagggcttgttagcacacagatgcctggg

SEQ ID NO: 11745 - DNA, 122 bp, Homo sapiens
  misc_feature (61)..(62): /note="This region represents a CpG dinucleotide"
  misc_feature (61)..(61): /note="Nucleotide may be methylated to form 5-methylcytosine"
tccattccaaggctctgggcctctggaggtggagttctctcagctggccccgggagacagcgcagtggccagagctctggctcatcaggtcagggaaagaaaatcaccctcagaatctctca

SEQ ID NO: 11746 - DNA, 122 bp, Homo sapiens
  misc_feature (61)..(62): /note="This region represents a CpG dinucleotide"
  misc_feature (61)..(61): /note="Nucleotide may be methylated to form 5-methylcytosine"
attcttggggaattgaggtgggcagagattggcagcccctgggacctgcttggctccaggcgatctgacagcagggaggattgcgaagtacagatctgtagacggggcgtggttttcaaaac

SEQ ID NO: 11747 - DNA, 122 bp, Homo sapiens
  misc_feature (61)..(62): /note="This region represents a CpG dinucleotide"
  misc_feature (61)..(61): /note="Nucleotide may be methylated to form 5-methylcytosine"
aacatgaccagttttcgaacttggcgtgctctgaattattaaaaataatcttatagtgtccgcccagccctctcaagcatacctgcctttaatcttgtaaacaagttcatagcaggaagggg

SEQ ID NO: 11748 - DNA, 122 bp, Homo sapiens
  misc_feature (61)..(62): /note="This region represents a CpG dinucleotide"
  misc_feature (61)..(61): /note="Nucleotide may be methylated to form 5-methylcytosine"
cctttaccacgtcccaaagctcctcccctccagcgaggtgtgtctggagctatgtgggggcgggaggaagggtgaagtgttaagagacccaaagcccggagaggtgctgctaagctggtctg

SEQ ID NO: 11749 - DNA, 122 bp, Homo sapiens
  misc_feature (61)..(62): /note="This region represents a CpG dinucleotide"
  misc_feature (61)..(61): /note="Nucleotide may be methylated to form 5-methylcytosine"
agatgaagacactgagggtcagagtggtgatgtgtcaggaaccctcccactgggttctcacgcttgaaacacagattgctggtccccacccacacagtttctgatgcagtaggtctgggtgg

SEQ ID NO: 11750 - DNA, 122 bp, Homo sapiens
  misc_feature (61)..(62): /note="This region represents a CpG dinucleotide"
  misc_feature (61)..(61): /note="Nucleotide may be methylated to form 5-methylcytosine"
tccagccagaaaccggctgagaaaaaaatgtgatgacactcatcctgagaagtgttgggacggagcctcacctggcttctgggtgaggcagtccaaagcctactcccatctcatgtcaaagt

SEQ ID NO: 11751 - DNA, 122 bp, Homo sapiens
  misc_feature (61)..(62): /note="This region represents a CpG dinucleotide"
  misc_feature (61)..(61): /note="Nucleotide may be methylated to form 5-methylcytosine"
tctaccactttctagctgggtgacctagggcaatttactcacactcttcatgttttagttcgctcatctgtaagtgggacttgtcatcaactgtacattgtgagattttcctaggaataaat

SEQ ID NO: 11752 - DNA, 122 bp, Homo sapiens
  misc_feature (61)..(62): /note="This region represents a CpG dinucleotide"
  misc_feature (61)..(61): /note="Nucleotide may be methylated to form 5-methylcytosine"
ccacctctttctgctctgtctggctaataccttctaaagccaggtatcagcttagactgccgcttgccccatacttgtgtgggtgcctctccttggtgctggcattacaccctgtgctcagt

SEQ ID NO: 11753 - DNA, 122 bp, Homo sapiens
  misc_feature (61)..(62): /note="This region represents a CpG dinucleotide"
  misc_feature (61)..(61): /note="Nucleotide may be methylated to form 5-methylcytosine"
taggtgcaaaatgccttttaaggtaggtcagtggggaaaacaagggcttaggtaacagggcggctaatgggcccagtggattaaaatgttcactttattcctgaaacccaggctggctgctc

SEQ ID NO: 11754 - DNA, 122 bp, Homo sapiens
  misc_feature (61)..(62): /note="This region represents a CpG dinucleotide"
  misc_feature (61)..(61): /note="Nucleotide may be methylated to form 5-methylcytosine"
atgccctgttgctacatcaacatgatggtaaatgcttcttacaaaacctgtagcttccttcgcatgcatcctgtaactcctgctgacttactgaatttgtgagtcagcataatggtcaagaa

SEQ ID NO: 11755 - DNA, 122 bp, Homo sapiens
  misc_feature (61)..(62): /note="This region represents a CpG dinucleotide"
  misc_feature (61)..(61): /note="Nucleotide may be methylated to form 5-methylcytosine"
cccaagttccctctgtagaatctgacaaagaccagggacaccctctgctctgcccttgagcgatgatcccttctcctccactgtgatgtaaaccaggcagcagccatggtacatgagatact

SEQ ID NO: 11756 - DNA, 122 bp, Homo sapiens
  misc_feature (61)..(62): /note="This region represents a CpG dinucleotide"
  misc_feature (61)..(61): /note="Nucleotide may be methylated to form 5-methylcytosine"
cactatcaattctggtttgcaccctggtcacttaatcactgtgcttccacaaccatgaaacgtcagtatggcaaatcctgccccaagctggtcatatcatacatccaaaatatcaaggcttc

SEQ ID NO: 11757 - DNA, 122 bp, Homo sapiens
  misc_feature (61)..(62): /note="This region represents a CpG dinucleotide"
  misc_feature (61)..(61): /note="Nucleotide may be methylated to form 5-methylcytosine"
tttaatacacaggttgacagtgatgacttcaccgtaccagtgtctgttggtcacaaaccacgtgtatactctgcagcaaggatgggctggcagtgaaaacctcatgtgtcattttgctttca

SEQ ID NO: 11758 - DNA, 122 bp, Homo sapiens
  misc_feature (61)..(62): /note="This region represents a CpG dinucleotide"
  misc_feature (61)..(61): /note="Nucleotide may be methylated to form 5-methylcytosine"
ctgccagacaccctacttgaaggatcctgttggaacctgtggaaataatacttacaagaacgttgcagctaagctggtccgggtgcagtggtgttacaactaatggatcacaaccagtcacg

SEQ ID NO: 11759 - DNA, 122 bp, Homo sapiens
  misc_feature (61)..(62): /note="This region represents a CpG dinucleotide"
  misc_feature (61)..(61): /note="Nucleotide may be methylated to form 5-methylcytosine"
agagggagagcgagttccagctcagtgtttgacaagatagcttacatcattttatccccacgtcaatgcagtgaggcaagtgaggtttattatcttcctgttatgaatgtgggctgtagaga

SEQ ID NO: 11760 - DNA, 122 bp, Homo sapiens
  misc_feature (61)..(62): /note="This region represents a CpG dinucleotide"
  misc_feature (61)..(61): /note="Nucleotide may be methylated to form 5-methylcytosine"
gagcgcagctcatttcatgtccctatctcatgagaagaaataggctgcactgggtatggacgtgggaggattacactgtaacatgctatttgtaagtactgaaatactggccttttaaataa

SEQ ID NO: 11761 - DNA, 122 bp, Homo sapiens
  misc_feature (61)..(62): /note="This region represents a CpG dinucleotide"
  misc_feature (61)..(61): /note="Nucleotide may be methylated to form 5-methylcytosine"
taggacttggttccatccttggtcacagccgctgaccttcaagagccccttctatatctgcgtttcaccaccaggtagaggcacccagcctcttgggctcactgtcaccgtctgtttgccaa

SEQ ID NO: 11762 - DNA, 122 bp, Homo sapiens
  misc_feature (61)..(62): /note="This region represents a CpG dinucleotide"
  misc_feature (61)..(61): /note="Nucleotide may be methylated to form 5-methylcytosine"
ggtttgagtcacattctccatagagcagtttgcccttcccagttctgtgttagtcagccccgttctcacttgcatcctgcctcgagtcacttgagcagcctctgggttcttccacagctcct

SEQ ID NO: 11763 - DNA, 122 bp, Homo sapiens
  misc_feature (61)..(62): /note="This region represents a CpG dinucleotide"
  misc_feature (61)..(61): /note="Nucleotide may be methylated to form 5-methylcytosine"
cagcatggtacttcttatcacacatggagtccacacacctgatgccaagtctccagttggcgcttgtccttaggccacactgccacccacaagagactcagggcgcaggggcaaacaagcca

SEQ ID NO: 11764 - DNA, 122 bp, Homo sapiens
  misc_feature (61)..(62): /note="This region represents a CpG dinucleotide"
  misc_feature (61)..(61): /note="Nucleotide may be methylated to form 5-methylcytosine"
agaaactaaggtctttgccatttgactctactcatgctacggcagcagactgcatcttctcgctctttagtggtaatccacattgctgggtccctcccacttttcttaataaccactggcgg

SEQ ID NO: 11765 - DNA, 122 bp, Homo sapiens
  misc_feature (61)..(62): /note="This region represents a CpG dinucleotide"
  misc_feature (61)..(61): /note="Nucleotide may be methylated to form 5-methylcytosine"
ttggattcaaaaggaagcctggcagtggcggggcctggacaggcagcctttgacctgaggcggggcggcgctctgcgctggttcagaaaagccgtggggcagcctctctggcaggcactggc

SEQ ID NO: 11766 - DNA, 122 bp, Homo sapiens
  misc_feature (61)..(62): /note="This region represents a CpG dinucleotide"
  misc_feature (61)..(61): /note="Nucleotide may be methylated to form 5-methylcytosine"
tgaacctgtgtgtttctgatgactcaacaattctgctcctaggtggatgcccatgagagacgtgcacatatgctcaccagttaggagatttgtcacagtgctgcttcatgacagccacagat

SEQ ID NO: 11767 - DNA, 122 bp, Homo sapiens
  misc_feature (61)..(62): /note="This region represents a CpG dinucleotide"
  misc_feature (61)..(61): /note="Nucleotide may be methylated to form 5-methylcytosine"
acaccatccaaggctccatggggtggactctgctcaaacacgtgactctggatttaatcacgccaatcatgacaccatctccttttggttacagtgactcaaagactaatgggtgtgaccag

SEQ ID NO: 11768 - DNA, 122 bp, Homo sapiens
  misc_feature (61)..(62): /note="This region represents a CpG dinucleotide"
  misc_feature (61)..(61): /note="Nucleotide may be methylated to form 5-methylcytosine"
atactgcctccccacctccccttaacctgaaattaaacgaggacctctcatgagccactgcgctccaggcataagaaattgtaatgtctggcttccagaaactgtcccgtcaaaatgtgctt

SEQ ID NO: 11769 - DNA, 122 bp, Homo sapiens
  misc_feature (61)..(62): /note="This region represents a CpG dinucleotide"
  misc_feature (61)..(61): /note="Nucleotide may be methylated to form 5-methylcytosine"
tgtcaaattgcccaatttacactcctgccactccaaatgggggcatgcctcacacccctgcgtggtccagtacacaatgaatgctcattttgtgaagtcacagggtcaaatctttctccgtg

SEQ ID NO: 11770 - DNA, 122 bp, Homo sapiens
  misc_feature (61)..(62): /note="This region represents a CpG dinucleotide"
  misc_feature (61)..(61): /note="Nucleotide may be methylated to form 5-methylcytosine"
aggttaggcaggggaggagggacaaagagaggcggaaaaaagagaaaaaaatttacaagacgagaaaagaggagaggtggtaacatgcttccagacagctcagctgcctttctgtgcatcag

SEQ ID NO: 11771 - DNA, 122 bp, Homo sapiens
  misc_feature (61)..(62): /note="This region represents a CpG dinucleotide"
  misc_feature (61)..(61): /note="Nucleotide may be methylated to form 5-methylcytosine"
aagcctcatcaataaataaaggggtgagcaatagacagtcatatgcaatgatacatatgacgcaatgagggagcaatgatacatatgatgcaatgacagaacaatgatgaagttagaaaata

SEQ ID NO: 11772 - DNA, 122 bp, Homo sapiens
  misc_feature (61)..(62): /note="This region represents a CpG dinucleotide"
  misc_feature (61)..(61): /note="Nucleotide may be methylated to form 5-methylcytosine"
cgacattcctaaacttaagtgtttctttcttccttctcctcttattaatatttcagcacgcgtgttcagtaacaccaaacggtggttccctttcaagaggaagtgagaaagaggaaatgtac

SEQ ID NO: 11773 - DNA, 122 bp, Homo sapiens
  misc_feature (61)..(62): /note="This region represents a CpG dinucleotide"
  misc_feature (61)..(61): /note="Nucleotide may be methylated to form 5-methylcytosine"
gggaggaaagcaaaccaggggagcagctgctgggccccagggctgggcctacagagctgacgcaggtgcaactaggcaaagaacattccagttcctccaaggccccgctaggatcattccat

SEQ ID NO: 11774 - DNA, 122 bp, Homo sapiens
  misc_feature (61)..(62): /note="This region represents a CpG dinucleotide"
  misc_feature (61)..(61): /note="Nucleotide may be methylated to form 5-methylcytosine"
agaattctgcctaaacattcacctcggtcacctccaggacaaccgcatccagggtggctacgagaacgtgccgactattgacatccacatgaaccagatcggctttgagcgggagtggcaca

SEQ ID NO: 11775 - DNA, 122 bp, Homo sapiens
  misc_feature (61)..(62): /note="This region represents a CpG dinucleotide"
  misc_feature (61)..(61): /note="Nucleotide may be methylated to form 5-methylcytosine"
gtggtcattgcactctagcacacatgactgctttaagttaataattaaactttagcacatcgagagggaattaggaggtgtcagcaatggtgatgaatctcaccccaactcatgttacccag

SEQ ID NO: 11776 - DNA, 122 bp, Homo sapiens
  misc_feature (61)..(62): /note="This region represents a CpG dinucleotide"
  misc_feature (61)..(61): /note="Nucleotide may be methylated to form 5-methylcytosine"
cacagtcttgtcttccccaccccatctctcaccccaaaccagccaccaccctagtccctacggtcacagctgcaggtgaagccttggccctgccctcccactgccggggccctgggggtgaa

SEQ ID NO: 11777 - DNA, 122 bp, Homo sapiens
  misc_feature (61)..(62): /note="This region represents a CpG dinucleotide"
  misc_feature (61)..(61): /note="Nucleotide may be methylated to form 5-methylcytosine"
tggggagtgttgctctcttctagtatctccctatggggaaaaaaatcagccacctgtcagcggccagcccatcctgccctgggtgtgtctactgcccccaggggctgctgtgggagttttgc

SEQ ID NO: 11778 - DNA, 122 bp, Homo sapiens
  misc_feature (61)..(62): /note="This region represents a CpG dinucleotide"
  misc_feature (61)..(61): /note="Nucleotide may be methylated to form 5-methylcytosine"
ggcagaatttgcagcctgattattcgtagaaataatttttcaaatcttgcctttccggtacggttcacaaggtggcaatttccatgtcactgaacatgaagcctgggtcttaaatatagcca

SEQ ID NO: 11779 - DNA, 122 bp, Homo sapiens
  misc_feature (61)..(62): /note="This region represents a CpG dinucleotide"
  misc_feature (61)..(61): /note="Nucleotide may be methylated to form 5-methylcytosine"
agtctgtcagtattgtaatgaaataattcattatgtaattaattgcttagtgtgcataagcgccgtaatggcagaggctatgtctcttgttcatagtcataacaccattgcctggcttggtg

SEQ ID NO: 11780 - DNA, 122 bp, Homo sapiens
  misc_feature (61)..(62): /note="This region represents a CpG dinucleotide"
  misc_feature (61)..(61): /note="Nucleotide may be methylated to form 5-methylcytosine"
ggaggcatgtccagcttctgatttctttgtaaaaatctctggtacctcaggctcatccagcgtctgcttttcagatgtttttccctccgggacagggaggtctagctcatttggacaaggtg

SEQ ID NO: 11781 - DNA, 122 bp, Homo sapiens
  misc_feature (61)..(62): /note="This region represents a CpG dinucleotide"
  misc_feature (61)..(61): /note="Nucleotide may be methylated to form 5-methylcytosine"
aaacaactccaacaggttcatgagcagctcatccaccaggtgctcgtcttggatgttggccgcgatgttggccagggcattaatcactgccagggagcaatgcctgaagaagaaggagtgaa

SEQ ID NO: 11782 - DNA, 122 bp, Homo sapiens
  misc_feature (61)..(62): /note="This region represents a CpG dinucleotide"
  misc_feature (61)..(61): /note="Nucleotide may be methylated to form 5-methylcytosine"
tcctgagtaatcagttctggtgcctccccaaatgagacaaatgacagtttcatggtcgctcgtggctatgaaatctcatcgagacaattcgactctggttaaattatatttaagttaataaa

SEQ ID NO: 11783 - DNA, 122 bp, Homo sapiens
  misc_feature (61)..(62): /note="This region represents a CpG dinucleotide"
  misc_feature (61)..(61): /note="Nucleotide may be methylated to form 5-methylcytosine"
cagtgagtcgtagatgattcctccagatcttgacgaggcccacaggcccttgtttaagaacgtcgcttgctgctttgctgcttctatggggcacattctggtgataaaggccagctgttttt

SEQ ID NO: 11784 - DNA, 122 bp, Homo sapiens
  misc_feature (61)..(62): /note="This region represents a CpG dinucleotide"
  misc_feature (61)..(61): /note="Nucleotide may be methylated to form 5-methylcytosine"
cgtgattcaccctccttggcctcttaaagtgctgggattacaagtgtgagccatcgcgcccggccggtttatttttttaaaaatggctgggcacagtgacttgtggctgtagttctagctac

SEQ ID NO: 11785 - DNA, 122 bp, Homo sapiens
  misc_feature (61)..(62): /note="This region represents a CpG dinucleotide"
  misc_feature (61)..(61): /note="Nucleotide may be methylated to form 5-methylcytosine"
aaggattcatttctaggacgaagattaccagctgcttcctccaaacagcctttcctgatccgtctcccaattagaactgatagctcccatggatgggtgtggtggctcacgcctgtaatccc

SEQ ID NO: 11786 - DNA, 122 bp, Homo sapiens
  misc_feature (61)..(62): /note="This region represents a CpG dinucleotide"
  misc_feature (61)..(61): /note="Nucleotide may be methylated to form 5-methylcytosine"
atggattaatcaagggccaccagttgcattactgattactaactttgcagaaatgaaacacggtatgttgggtcaaggttcagtgaggctggttttcataacattccaggcaataaacaggc

SEQ ID NO: 11787 - DNA, 122 bp, Homo sapiens
  misc_feature (61)..(62): /note="This region represents a CpG dinucleotide"
  misc_feature (61)..(61): /note="Nucleotide may be methylated to form 5-methylcytosine"
tggctccttcttctcttcaaagtcttcgttgaacaggtcctgtatgtcatcctcaggaaccgtgttggccaattcatctattaattcttgccactcctgatcattcagattaatgtctgaga

SEQ ID NO: 11788 - DNA, 122 bp, Homo sapiens
  misc_feature (61)..(62): /note="This region represents a CpG dinucleotide"
  misc_feature (61)..(61): /note="Nucleotide may be methylated to form 5-methylcytosine"
aaaggggtcagggagagatccagcaggaaaggctcttctagtggaccaaccgcttacatccggactattactccacccagtcttccaaggagattctccagtgttagcctttcaggttccta

SEQ ID NO: 11789 - DNA, 122 bp, Homo sapiens
  misc_feature (61)..(62): /note="This region represents a CpG dinucleotide"
  misc_feature (61)..(61): /note="Nucleotide may be methylated to form 5-methylcytosine"
attcatcatctcaacttgggtgccaaatatgcacctcaaactatacattctaaacctgctcgcctgcagtctttcctagtttagctcatggcaatttcatccttctggttgattggatccaa

SEQ ID NO: 11790 - DNA, 122 bp, Homo sapiens
  misc_feature (61)..(62): /note="This region represents a CpG dinucleotide"
  misc_feature (61)..(61): /note="Nucleotide may be methylated to form 5-methylcytosine"
gtctcccttgctttgtaaacatgtttaaccatgttataaaagctgttctaaaccgtcagacgtgggatctaaacaacaacaaatgttctgcagttggctgatctggaaagtgagcaagccac

SEQ ID NO: 11791 - DNA, 122 bp, Homo sapiens
  misc_feature (61)..(62): /note="This region represents a CpG dinucleotide"
  misc_feature (61)..(61): /note="Nucleotide may be methylated to form 5-methylcytosine"
ggaaatccagccagccacagttcccagaatcattttcatgaatatttaaagtagagaggacggtcactaataggaagtgctaaaccacagccaggggagggatggcaccaactgactcccct

SEQ ID NO: 11792 - DNA, 122 bp, Homo sapiens
  misc_feature (61)..(62): /note="This region represents a CpG dinucleotide"
  misc_feature (61)..(61): /note="Nucleotide may be methylated to form 5-methylcytosine"
caggaacacatttggatattgacacaacttcatctgcagttggcttgtcatcctgagctccgttcccaggcagcgtagatattgcacaggattttgctgaccagggagttgggttataagtg

SEQ ID NO: 11793 - DNA, 122 bp, Homo sapiens
  misc_feature (61)..(62): /note="This region represents a CpG dinucleotide"
  misc_feature (61)..(61): /note="Nucleotide may be methylated to form 5-methylcytosine"
ggtcctagggtgcatgacgagtatgcagttcaggtcacgtgtgactcacggtgagtctgacgactgccagctggttcagtgagatgagtccactcatcatgcacttggatgtcttgacagtg

SEQ ID NO: 11794 - DNA, 122 bp, Homo sapiens
  misc_feature (61)..(62): /note="This region represents a CpG dinucleotide"
  misc_feature (61)..(61): /note="Nucleotide may be methylated to form 5-methylcytosine"
gagtcaggtatcccagggatctgtgacgagggagctggggcatgggtgtcggaccaaagacgcctaagtttgaatcccagctgtgagcttgggcaagctcctcaacctctctgagcccatgc

SEQ ID NO: 11795 - DNA, 122 bp, Homo sapiens
  misc_feature (61)..(62): /note="This region represents a CpG dinucleotide"
  misc_feature (61)..(61): /note="Nucleotide may be methylated to form 5-methylcytosine"
gacaattgttagagaggattaatgagtcaccgtggtatgcaatccaggttgacgagtctacggatgttgacggcaaggcaacaatgcttgtttctgtgtgatatatttttcaggagcatgtg

SEQ ID NO: 11796 - DNA, 122 bp, Homo sapiens
  misc_feature (61)..(62): /note="This region represents a CpG dinucleotide"
  misc_feature (61)..(61): /note="Nucleotide may be methylated to form 5-methylcytosine"
gatggcctgaggaaataaatcagtggagttgggaagcgtggaaccacccacctgctcaggcggaggcaggcaaatcctcataagagtgtcattgggtcaccactatgtgtccaacaacaggg

SEQ ID NO: 11797 - DNA, 122 bp, Homo sapiens
  misc_feature (61)..(62): /note="This region represents a CpG dinucleotide"
  misc_feature (61)..(61): /note="Nucleotide may be methylated to form 5-methylcytosine"
aatctcacttctgctttcaacatttcttaccaaatccagtttctaggacacaaatcattccgcaacccctccttccaatttctaatcctattttaatcactgaaatgggcagagtcagattt

SEQ ID NO: 11798 - DNA, 122 bp, Homo sapiens
  misc_feature (61)..(62): /note="This region represents a CpG dinucleotide"
  misc_feature (61)..(61): /note="Nucleotide may be methylated to form 5-methylcytosine"
ataaaaatccttacaatccctttagttcacattcacaggccgagcatagtgattcaccttcgcccttccttcagctggggcctgttgcaggtgagaggctgtgatccaggaaaggtgggagg

SEQ ID NO: 11799 - DNA, 122 bp, Homo sapiens
  misc_feature (61)..(62): /note="This region represents a CpG dinucleotide"
  misc_feature (61)..(61): /note="Nucleotide may be methylated to form 5-methylcytosine"
ctctttccacagattcatctctagtctctgtaaaatgccagccctcttctgggttaacagcgcctaaccgacatgcgccactagttcttccttgtttcaaagtgttctctaaacacagagtt

SEQ ID NO: 11800 - DNA, 122 bp, Homo sapiens
  misc_feature (61)..(62): /note="This region represents a CpG dinucleotide"
  misc_feature (61)..(61): /note="Nucleotide may be methylated to form 5-methylcytosine"
cacagtcaaataagcaaatccagtcaagatcattcaagccaagcacaaattaaccaagcccgagagactcataagctaagtaaatgtttaacattaaatgccactgaagttcagcagttgtt

SEQ ID NO: 11801 - DNA, 122 bp, Homo sapiens
  misc_feature (61)..(62): /note="This region represents a CpG dinucleotide"
  misc_feature (61)..(61): /note="Nucleotide may be methylated to form 5-methylcytosine"
tggtgagcttcactgaagacagggctgtggcctttcttgcctatcctacaaaacatggcacgtacagcacataatagatcctcattaagtatgagttaaattgagtccagactagctggctg

SEQ ID NO: 11802 - DNA, 122 bp, Homo sapiens
  misc_feature (61)..(62): /note="This region represents a CpG dinucleotide"
  misc_feature (61)..(61): /note="Nucleotide may be methylated to form 5-methylcytosine"
caccatcatcatcatcgtcagtggctgcagcatctttgctaacatttattaagtgcttaccgtctaccaggttctgtagtaattacctgacctgcattattttatttaattctccacagaat

SEQ ID NO: 11803 - DNA, 122 bp, Homo sapiens
  misc_feature (61)..(62): /note="This region represents a CpG dinucleotide"
  misc_feature (61)..(61): /note="Nucleotide may be methylated to form 5-methylcytosine"
caaatagagcaggattgtaatcacagctactattttttgggcatgttaggacttttcacacgttatgtttagtcttttccatcatcctgtggtagggcagatattattttcctcttcacttt

SEQ ID NO: 11804 - DNA, 122 bp, Homo sapiens
  misc_feature (61)..(62): /note="This region represents a CpG dinucleotide"
  misc_feature (61)..(61): /note="Nucleotide may be methylated to form 5-methylcytosine"
caggtggccatccatataggggaatagactagcttttttttaaaaaaaatatcctttcaacgaggttgtactgcaaactggaaaactggtttgaatatattctaaggttaaaacataaacat

SEQ ID NO: 11805 - DNA, 122 bp, Homo sapiens
  misc_feature (61)..(62): /note="This region represents a CpG dinucleotide"
  misc_feature (61)..(61): /note="Nucleotide may be methylated to form 5-methylcytosine"
ctgggtttaaggaaggattctgtagcctaaacccatgacaaatgagaggcggcaatgactcgtgagtagctaagactggattgatctctgttgttttgaatattggacttattttctaagat

SEQ ID NO: 11806 - DNA, 122 bp, Homo sapiens
  misc_feature (61)..(62): /note="This region represents a CpG dinucleotide"
  misc_feature (61)..(61): /note="Nucleotide may be methylated to form 5-methylcytosine"
gaggatggcccaagcccaggtccctggcatggtggggcaggggcctgagtcacagcctggcgtgaccctgcccagtccccaggaatggccagctcgtccagaggtgagacccaggtcaacaa

SEQ ID NO: 11807 - DNA, 122 bp, Homo sapiens
  misc_feature (61)..(62): /note="This region represents a CpG dinucleotide"
  misc_feature (61)..(61): /note="Nucleotide may be methylated to form 5-methylcytosine"
tactattatccccattttacagatgatgaaactgagggacaagttttttttaagtggctacgtcactaaaggtagtagctgagcaatactgaagtgttagtctgacttcaaagctggtgtaa

SEQ ID NO: 11808 - DNA, 122 bp, Homo sapiens
  misc_feature (61)..(62): /note="This region represents a CpG dinucleotide"
  misc_feature (61)..(61): /note="Nucleotide may be methylated to form 5-methylcytosine"
caggaggcccagagtgaatgggccttcaatgtgcggctcttaaggcatcaccagaggcatcgctggtgctcaggaagccccaggtgctcaggagggagtcccaaaggcttcttggagaaaca

SEQ ID NO: 11809 - DNA, 122 bp, Homo sapiens
  misc_feature (61)..(62): /note="This region represents a CpG dinucleotide"
  misc_feature (61)..(61): /note="Nucleotide may be methylated to form 5-methylcytosine"
tgcattctccttgccaatcctagcctggggaagatggcaccaatctctctctcccatgtgcgccagaacactgtaaaacaggactgactggtcttgctagtgaagtatgtcactcacctttg

SEQ ID NO: 11810 - DNA, 122 bp, Homo sapiens
  misc_feature (61)..(62): /note="This region represents a CpG dinucleotide"
  misc_feature (61)..(61): /note="Nucleotide may be methylated to form 5-methylcytosine"
cgccaactcctacctctgatgaggtcctttggttgcttcccttcatggcagaaggcagagcggagccagcgtgtgcaaaagccacatagcaagagaggaagcaaggggagggaggtgcaggc

SEQ ID NO: 11811 - DNA, 122 bp, Homo sapiens
  misc_feature (61)..(62): /note="This region represents a CpG dinucleotide"
  misc_feature (61)..(61): /note="Nucleotide may be methylated to form 5-methylcytosine"
cttgggtaaataggagtgcggttgctgagtcataagggtatgcatttggttagtagttgacggaagttttctaaagtagttctactggtttacactctgctggcagagtgtaagagttctag

SEQ ID NO: 11812 - DNA, 122 bp, Homo sapiens
  misc_feature (61)..(62): /note="This region represents a CpG dinucleotide"
  misc_feature (61)..(61): /note="Nucleotide may be methylated to form 5-methylcytosine"
cttggctcattttctccacaaagccatttcctctgagtcagtgattttcaaactttatagcgtatcaactacaaggattgtcaaaacaaaggctgctaagccctgaccccagaatttgtttt

SEQ ID NO: 11813 - DNA, 122 bp, Homo sapiens
  misc_feature (61)..(62): /note="This region represents a CpG dinucleotide"
  misc_feature (61)..(61): /note="Nucleotide may be methylated to form 5-methylcytosine"
gtacctggcatagggcttttggcgtcatactccaattcattttccctacaggacatgatccgtgacttagtcatcatgttattaacattaaactttatagtgcagagatgagtcggggaaga

SEQ ID NO: 11814 - DNA, 122 bp, Homo sapiens
  misc_feature (61)..(62): /note="This region represents a CpG dinucleotide"
  misc_feature (61)..(61): /note="Nucleotide may be methylated to form 5-methylcytosine"
gggatggaactgagcttagaaccttggtctgtctgactttagaagctagcgcttaacctccgtgctattctgcagaggttcaaactggtggccaataagccagctgtggcccacagacatgc

SEQ ID NO: 11815 - DNA, 122 bp, Homo sapiens
  misc_feature (61)..(62): /note="This region represents a CpG dinucleotide"
  misc_feature (61)..(61): /note="Nucleotide may be methylated to form 5-methylcytosine"
ccctcataagctgagtcagcagatctaaattgatagccagacagcagaggctgaggacagcgcctccctcaaagccaaacaacaggggttcctggactgggccattctttagaggccccact

SEQ ID NO: 11816 - DNA, 122 bp, Homo sapiens
  misc_feature (61)..(62): /note="This region represents a CpG dinucleotide"
  misc_feature (61)..(61): /note="Nucleotide may be methylated to form 5-methylcytosine"
ccactgatgtgatgcaatggaatgtacatggcatcactaaagtcttcttgcaccactccccgcaacaggaaaaaaaaaaaaaaaaaactaaatctaattgagcctatagatcaaacactgtg

SEQ ID NO: 11817 - DNA, 122 bp, Homo sapiens
  misc_feature (61)..(62): /note="This region represents a CpG dinucleotide"
  misc_feature (61)..(61): /note="Nucleotide may be methylated to form 5-methylcytosine"
gtcccacggaaagagaccagacctggaaaagacagagtcaaagctgggtgagcaggccttcgaagggcgtggctcagcaaagataatccatattgtagtgcaagaggattcttgtggaatat

SEQ ID NO: 11818 - DNA, 122 bp, Homo sapiens
  misc_feature (61)..(62): /note="This region represents a CpG dinucleotide"
  misc_feature (61)..(61): /note="Nucleotide may be methylated to form 5-methylcytosine"
cattcctgtataaagtgtctggtgacccctgctggggggctctcacccaggcaggaggcacgggatcccagacctgtgtaatgaagcactctagctgccccttggcagagggggtgtgttgt

SEQ ID NO: 11819 - DNA, 122 bp, Homo sapiens
  misc_feature (61)..(62): /note="This region represents a CpG dinucleotide"
  misc_feature (61)..(61): /note="Nucleotide may be methylated to form 5-methylcytosine"
caattttcataaaagacacagtatctgagatggctgttaaacatgtcaagagattgtgtacgaggggaataaatcaaggaagactctataggttggtctgattctgtgatattaccagaatt

SEQ ID NO: 11820 - DNA, 122 bp, Homo sapiens
  misc_feature (61)..(62): /note="This region represents a CpG dinucleotide"
  misc_feature (61)..(61): /note="Nucleotide may be methylated to form 5-methylcytosine"
aaaaagatgaggctgggcttgatgactcatgcctgtaatctcagccactatggaggctgacggtggcagactgcttcagctcggtaattcaagaccagcctgagaaacacagcaacatcccc

SEQ ID NO: 11821 - DNA, 122 bp, Homo sapiens
  misc_feature (61)..(62): /note="This region represents a CpG dinucleotide"
  misc_feature (61)..(61): /note="Nucleotide may be methylated to form 5-methylcytosine"
agtcacagagccgggcctcaacctggcctttaaaaagacgctacccgtttacattctcagcgtgagtagaagaaactgcccatgtcccttcacctttcccagtattcaatattatattttta

SEQ ID NO: 11822 - DNA, 122 bp, Homo sapiens
  misc_feature (61)..(62): /note="This region represents a CpG dinucleotide"
  misc_feature (61)..(61): /note="Nucleotide may be methylated to form 5-methylcytosine"
ctcaagtgatccacctgccttggcctcccaagttgctgggattacaggcttgagccaccacgccagccaaacaggatatttaaattaaagccaaaatggccggcgcggtggctcacgcctgt

SEQ ID NO: 11823 - DNA, 122 bp, Homo sapiens
  misc_feature (61)..(62): /note="This region represents a CpG dinucleotide"
  misc_feature (61)..(61): /note="Nucleotide may be methylated to form 5-methylcytosine"
agtgggaactgcttggtcttggcatctaggcctgggcttgcctgctttgaggcaggcttccgtctgcatctggagccagacatttcggtgtttgtgagatgcattattgatacggtgatgta

SEQ ID NO: 11824 - DNA, 122 bp, Homo sapiens
  misc_feature (61)..(62): /note="This region represents a CpG dinucleotide"
  misc_feature (61)..(61): /note="Nucleotide may be methylated to form 5-methylcytosine"
gaagaatatgcttctcaaatgcaaatccaatcaagttatctccctgcttaaatccaaactcgctcatgtggcccacaaagcctaccttgcctgcctctctctaacctcacccaaaacacact

SEQ ID NO: 11825 - DNA, 122 bp, Homo sapiens
  misc_feature (61)..(62): /note="This region represents a CpG dinucleotide"
  misc_feature (61)..(61): /note="Nucleotide may be methylated to form 5-methylcytosine"
tcagaaggaacttcagaatttgggcaatgcctcttagccatcattacaaacaattcttcccgtattagagccatttcagtaataacagacaagtcctgacatacaagaatcaggttgccttc

SEQ ID NO: 11826 - DNA, 122 bp, Homo sapiens
  misc_feature (61)..(62): /note="This region represents a CpG dinucleotide"
  misc_feature (61)..(61): /note="Nucleotide may be methylated to form 5-methylcytosine"
agtcaaggcacagtctctcaggaagtggagaaaagggagattgtaggtgggaagagggtacgcagcaaggtaatggtgctgccttgagaaccaccaggcaattgatatccaaccactttcct

SEQ ID NO: 11827 - DNA, 122 bp, Homo sapiens
  misc_feature (61)..(62): /note="This region represents a CpG dinucleotide"
  misc_feature (61)..(61): /note="Nucleotide may be methylated to form 5-methylcytosine"
aggtgaggctaacgttcacatgccttgagagtggccgggatgactcttgcaggccagtctcgctggttgcttttatctctgatgaatccaccctatttggctttgggggtgcctgactcact

SEQ ID NO: 11828 - DNA, 122 bp, Homo sapiens
  misc_feature (61)..(62): /note="This region represents a CpG dinucleotide"
  misc_feature (61)..(61): /note="Nucleotide may be methylated to form 5-methylcytosine"
tctgtcttgtcaatccacatagtgatcatcatcttggctgcacagatgagtcaatagaggcgtggagatgttgaataatgagcttaaagtcatgccattaatcagtggtgtccatctgcctc

SEQ ID NO: 11829 - DNA, 122 bp, Homo sapiens
  misc_feature (61)..(62): /note="This region represents a CpG dinucleotide"
  misc_feature (61)..(61): /note="Nucleotide may be methylated to form 5-methylcytosine"
tctaacaaaaacaaatcagtcatcgtttcccttcttccaggagactgtgcctgaggaaagcggggggcgtggctgcagttctggacgggctggccgagctgcgcgggatccttgtgcaggga

SEQ ID NO: 11830 - DNA, 122 bp, Homo sapiens
  misc_feature (61)..(62): /note="This region represents a CpG dinucleotide"
  misc_feature (61)..(61): /note="Nucleotide may be methylated to form 5-methylcytosine"
agaatgatcagtagtatttacgtggtgcctggggttctgtggctttgggctcatctcccacgcccttcaactcactgattcggccagggtccttgttgcagccccttcctcaatttacctta

SEQ ID NO: 11831 - DNA, 122 bp, Homo sapiens
  misc_feature (61)..(62): /note="This region represents a CpG dinucleotide"
  misc_feature (61)..(61): /note="Nucleotide may be methylated to form 5-methylcytosine"
ccagtgagacaagactggtggttctcaaagactcatatgtcccttacaggcgcctgcccccgcaaccgattcgaccactccctagatttggtgagactaattccaccccattttctttctcc

SEQ ID NO: 11832 - DNA, 122 bp, Homo sapiens
  misc_feature (61)..(62): /note="This region represents a CpG dinucleotide"
  misc_feature (61)..(61): /note="Nucleotide may be methylated to form 5-methylcytosine"
taattaattataagtgaaaagccaaaatgaggtattaggtcaagcatagctatgtgtctccgcttcaaatccagccataagctgataattgcagttcataagtatgataattgggtgctcac

SEQ ID NO: 11833 - DNA, 122 bp, Homo sapiens
  misc_feature (61)..(62): /note="This region represents a CpG dinucleotide"
  misc_feature (61)..(61): /note="Nucleotide may be methylated to form 5-methylcytosine"
atcccatcatgacagcctgctgttactcacagctggcagatactgtaaactgtgttgccacgtcagctgcccagaacctttctgcttcagcagcagtttcccatcggaatggcttaataggc

SEQ ID NO: 11834 - DNA, 122 bp, Homo sapiens
  misc_feature (61)..(62): /note="This region represents a CpG dinucleotide"
  misc_feature (61)..(61): /note="Nucleotide may be methylated to form 5-methylcytosine"
accaagtcatggtcactcctttcaaccctgcctgcccctgggccatctgtgttgtgatgccggctggccaggatggggagtgaggatttcagtttgtcatagggcagggagatgggtgaggc

SEQ ID NO: 11835 - DNA, 122 bp, Homo sapiens
  misc_feature (61)..(62): /note="This region represents a CpG dinucleotide"
  misc_feature (61)..(61): /note="Nucleotide may be methylated to form 5-methylcytosine"
agccccagaaatgacaagcgtgtcttggcagagccagcacacaagtggatgtgaagtgcccgtcttgacctcctcatcaggctgctgcaggcctctggcgggcagggcactgggagaggccc

SEQ ID NO: 11836 - DNA, 122 bp, Homo sapiens
  misc_feature (61)..(62): /note="This region represents a CpG dinucleotide"
  misc_feature (61)..(61): /note="Nucleotide may be methylated to form 5-methylcytosine"
agtctctgcctgcatagcctattatttctcacaagcaatccatgaagaaggttaagacaacggactttcacgccagactgcctgggttcttatcaagtatgtgacttagtttatatatttgt

SEQ ID NO: 11837 - DNA, 122 bp, Homo sapiens
  misc_feature (61)..(62): /note="This region represents a CpG dinucleotide"
  misc_feature (61)..(61): /note="Nucleotide may be methylated to form 5-methylcytosine"
ttgtctccttagctccaatgcctttgtcctgattcagtgactcatttcttatatgtccatcgttttctaataggtttccttgctcctgattttttaatcatttattctatcctccatctctt

SEQ ID NO: 11838 - DNA, 122 bp, Homo sapiens
  misc_feature (61)..(62): /note="This region represents a CpG dinucleotide"
  misc_feature (61)..(61): /note="Nucleotide may be methylated to form 5-methylcytosine"
gaaccaggaggccatctgcccatgatctcaccaccacccaggcagtgctgacctcggcagcgccagcttcccagcccaggctgacacatctgtgggtggggactaggactccccttcatcac

SEQ ID NO: 11839 - DNA, 122 bp, Homo sapiens
  misc_feature (61)..(62): /note="This region represents a CpG dinucleotide"
  misc_feature (61)..(61): /note="Nucleotide may be methylated to form 5-methylcytosine"
aagatgagtaagccatcagagagcttacaatcaagaaatggtattgtattcagcccctatcgcatgctttgtacaaagcaggtacacacaaaaaaatctcatgggaagcctgcagaaattac

SEQ ID NO: 11840 - DNA, 122 bp, Homo sapiens
  misc_feature (61)..(62): /note="This region represents a CpG dinucleotide"
  misc_feature (61)..(61): /note="Nucleotide may be methylated to form 5-methylcytosine"
cccatttatggagggaggaggtgagtttcaaagatattaagtgatttgccctagttcatacggctagtaaaggacagagccaggatttgcactcaagtctattgactctaaattgtagaatg

SEQ ID NO: 11841 - DNA, 122 bp, Homo sapiens
  misc_feature (61)..(62): /note="This region represents a CpG dinucleotide"
  misc_feature (61)..(61): /note="Nucleotide may be methylated to form 5-methylcytosine"
acatcaaggatacatactatcaacctgcttcatcatgtttatgctgatgttacccttcatcgcctggctgaggtagtttgtcaggttcctccataaggttactttttgtccctttcttgaat

SEQ ID NO: 11842 - DNA, 122 bp, Homo sapiens
  misc_feature (61)..(62): /note="This region represents a CpG dinucleotide"
  misc_feature (61)..(61): /note="Nucleotide may be methylated to form 5-methylcytosine"
tcttccctcgtgcacagcctgtcctgtgagtaggtgcaggtactgactggtcttatctttcgccctgaaaatataaacgttttaaaggcacctgaggatttgtcagcacctccccaccccca

SEQ ID NO: 11843 - DNA, 122 bp, Homo sapiens
  misc_feature (61)..(62): /note="This region represents a CpG dinucleotide"
  misc_feature (61)..(61): /note="Nucleotide may be methylated to form 5-methylcytosine"
atcctcatgcccctttgtaatctgtaatctatcatccctcctttactccatttcaggcaacgactggctttgctctctgtcatcacagattagtttgcatttttaaaaactagtctgggcac

SEQ ID NO: 11844 - DNA, 122 bp, Homo sapiens
  misc_feature (61)..(62): /note="This region represents a CpG dinucleotide"
  misc_feature (61)..(61): /note="Nucleotide may be methylated to form 5-methylcytosine"
gagaacaagataagcaaggtcttgacccttacagacctcacagtggggaactctatggctcgatgactatatccacaggattttaatttatggaggtgaccaagtgatgacacaaagagcct

SEQ ID NO: 11845 - DNA, 122 bp, Homo sapiens
  misc_feature (61)..(62): /note="This region represents a CpG dinucleotide"
  misc_feature (61)..(61): /note="Nucleotide may be methylated to form 5-methylcytosine"
gagtgcgcctggctagtgtgtagtttcagagtgcggtctatggggctcccctgggcccttcgcaggtgcagcctgcctggggtttcccacaggcagtactctacacagcctgccttttggtt

SEQ ID NO: 11846 - DNA, 122 bp, Homo sapiens
  misc_feature (61)..(62): /note="This region represents a CpG dinucleotide"
  misc_feature (61)..(61): /note="Nucleotide may be methylated to form 5-methylcytosine"
ccctgccaaggtagcgaaggaagaagggtgagatctctgcaagaaatgctgatgaatccacgtcagggcatttttagtcagaaatggtatcctctggtatgacatcagaagagtttaagact

SEQ ID NO: 11847 - DNA, 122 bp, Homo sapiens
  misc_feature (61)..(62): /note="This region represents a CpG dinucleotide"
  misc_feature (61)..(61): /note="Nucleotide may be methylated to form 5-methylcytosine"
tctgatgatgtggccaggatgtcagctgcaaaatgaaccccaggtcattcagtgaggctgcgtctacctgtaactttgccatgtcctaaaaaggtcttgaagggcagacagatggttgatag

SEQ ID NO: 11848 - DNA, 122 bp, Homo sapiens
  misc_feature (61)..(62): /note="This region represents a CpG dinucleotide"
  misc_feature (61)..(61): /note="Nucleotide may be methylated to form 5-methylcytosine"
gcctttaaggagcccttatgttcgtcaccctggtgcagaaattggcatgcctcatttaggcgccatcctccacaaagtcactcatatcccaaccgggagccagctctgacatctagtcatcg

SEQ ID NO: 11849 - DNA, 122 bp, Homo sapiens
  misc_feature (61)..(62): /note="This region represents a CpG dinucleotide"
  misc_feature (61)..(61): /note="Nucleotide may be methylated to form 5-methylcytosine"
tcctttattatgccctaaatacacagagtagattaagcacaatcctttgtcatcatacgtcgtcatcattggtccataaatgacctttttctctctctccctgttgctctttcagcatgtac

SEQ ID NO: 11850 - DNA, 122 bp, Homo sapiens
  misc_feature (61)..(62): /note="This region represents a CpG dinucleotide"
  misc_feature (61)..(61): /note="Nucleotide may be methylated to form 5-methylcytosine"
cacgggaagctgctacaggcactgggaggagaatgggcagcagcaaacggccttgggagacgaaaagcgtctcaaaaccaattgtggtgacggctgcaactccatgaatgtcctgaaaccca

SEQ ID NO: 11851 - DNA, 122 bp, Homo sapiens
  misc_feature (61)..(62): /note="This region represents a CpG dinucleotide"
  misc_feature (61)..(61): /note="Nucleotide may be methylated to form 5-methylcytosine"
tgattcacattcgtactgtgtctggattgactcaaaaattcatcattaatgagcaagaagcgatacagtacagtggagtaatacacttgaaatgaaaccagtcatctttccctgctgttctt

SEQ ID NO: 11852 - DNA, 122 bp, Homo sapiens
  misc_feature (61)..(62): /note="This region represents a CpG dinucleotide"
  misc_feature (61)..(61): /note="Nucleotide may be methylated to form 5-methylcytosine"
aagttgaaaaaaatgttaaaattcccttgcaagagagtttaacaccccagacacaggctgcgacaatgagcaaggaagatggttattcctgtgggataaggctatacattttagtgttccag

SEQ ID NO: 11853 - DNA, 122 bp, Homo sapiens
  misc_feature (61)..(62): /note="This region represents a CpG dinucleotide"
  misc_feature (61)..(61): /note="Nucleotide may be methylated to form 5-methylcytosine"
gagaatgatgactgacattccttctatattcagtttgaccttgagaatccagctggaacccgtaagtattagtctaggaggagcagtctgaggtcactctatttttcctccctgtcttatct

SEQ ID NO: 11854 - DNA, 122 bp, Homo sapiens
  misc_feature (61)..(62): /note="This region represents a CpG dinucleotide"
  misc_feature (61)..(61): /note="Nucleotide may be methylated to form 5-methylcytosine"
cattgaggggctaccagggctaccgctattacgaatgacagtgaccgtgaccataactgacgctcattgggcctaccacatgccaggccctgtgctgagccctcgttctaggcccgagggca

SEQ ID NO: 11855 - DNA, 122 bp, Homo sapiens
  misc_feature (61)..(62): /note="This region represents a CpG dinucleotide"
  misc_feature (61)..(61): /note="Nucleotide may be methylated to form 5-methylcytosine"
tgagaagttatctaagaacacagggcaggagatggtaactcctccacagggcaggagatgcggtgattcaaaggtaatctgataagctgatatttgctttagggttactggatgacaatatg

SEQ ID NO: 11856 - DNA, 122 bp, Homo sapiens
  misc_feature (61)..(62): /note="This region represents a CpG dinucleotide"
  misc_feature (61)..(61): /note="Nucleotide may be methylated to form 5-methylcytosine"
agtcaatgcctctctgccccaccctttgttcagtgtggctggtgccacgacaaatgtgtgcgatcggaggaatgcctgagcgggacatggactcaacagatctgtctgcctgcaatctacaa

SEQ ID NO: 11857 - DNA, 122 bp, Homo sapiens
  misc_feature (61)..(62): /note="This region represents a CpG dinucleotide"
  misc_feature (61)..(61): /note="Nucleotide may be methylated to form 5-methylcytosine"
ctacctgaggaggtggcccttggactggctagtgtttgttgtctggcctctttattgcctcgtgatatggttacactctgtgtccccacccagatctcatcttgaattgtaatccccataat

SEQ ID NO: 11858 - DNA, 122 bp, Homo sapiens
  misc_feature (61)..(62): /note="This region represents a CpG dinucleotide"
  misc_feature (61)..(61): /note="Nucleotide may be methylated to form 5-methylcytosine"
ctgcccattcatttttaagtaaaggctttctcccttatgataatatcacaataattgccacgtaatgtgtgcattctgtcagaaaataatggtgagaaagttaaaacttggcccttcatgca

SEQ ID NO: 11859 - DNA, 122 bp, Homo sapiens
  misc_feature (61)..(62): /note="This region represents a CpG dinucleotide"
  misc_feature (61)..(61): /note="Nucleotide may be methylated to form 5-methylcytosine"
ttaggaaaattatgaagcttcagatttccttcccatttgtttacaaagaatatatgaatgcgataggattatgccgaacctggggaagagttgtattactcagaatgattcactgactcctt

SEQ ID NO: 11860 - DNA, 122 bp, Homo sapiens
  misc_feature (61)..(62): /note="This region represents a CpG dinucleotide"
  misc_feature (61)..(61): /note="Nucleotide may be methylated to form 5-methylcytosine"
tgaggccatgtttaagctcaggggtgacctggctgggaagagggtataaacccatgaacacgagtcagttgacagactaggattgccactttgtaaagaagagcccaagacctgatcagaat

SEQ ID NO: 11861 - DNA, 122 bp, Homo sapiens
  misc_feature (61)..(62): /note="This region represents a CpG dinucleotide"
  misc_feature (61)..(61): /note="Nucleotide may be methylated to form 5-methylcytosine"
cctccacttaattacccctttgaaaacaacacacaggagatttacagtaatcaccataatcgcctcataaaaacccgagagtttgaagacggacacgcctcatttctgggaggaattagagg

SEQ ID NO: 11862 - DNA, 122 bp, Homo sapiens
  misc_feature (61)..(62): /note="This region represents a CpG dinucleotide"
  misc_feature (61)..(61): /note="Nucleotide may be methylated to form 5-methylcytosine"
taatggaaaaacaatgccaattacagcagcattatccgggattataaagcttctaagaggcggctcacacctccaggcatgctgtgcctgggaatttccagggtagacttgggatcagagca

SEQ ID NO: 11863 - DNA, 122 bp, Homo sapiens
  misc_feature (61)..(62): /note="This region represents a CpG dinucleotide"
  misc_feature (61)..(61): /note="Nucleotide may be methylated to form 5-methylcytosine"
tggaagcttggctctaactctgtgcaagaccattccatgttagcgcttgaggcaggcaggcgcctgtcatctcattggcacaaagggccttggatcaagagagagcagaattagaaaacacc

SEQ ID NO: 11864 - DNA, 122 bp, Homo sapiens
  misc_feature (61)..(62): /note="This region represents a CpG dinucleotide"
  misc_feature (61)..(61): /note="Nucleotide may be methylated to form 5-methylcytosine"
ccagctcctttgggtccctatgacccaggccctaatcatgaactgaaattgaaattggaacgcccattctctgctgcaagttgcaagctgaaaatcagcccaggtggttaggagtgtccaac

SEQ ID NO: 11865 - DNA, 122 bp, Homo sapiens
  misc_feature (61)..(62): /note="This region represents a CpG dinucleotide"
  misc_feature (61)..(61): /note="Nucleotide may be methylated to form 5-methylcytosine"
attctggcaaagagctattttacagaaatgacttctagatgactcacgaagccgacaacacgtctgtcatctcctagtaccagggaaaggacagtagagacagtcgttgtcagggaatggtg

SEQ ID NO: 11866 - DNA, 122 bp, Homo sapiens
  misc_feature (61)..(62): /note="This region represents a CpG dinucleotide"
  misc_feature (61)..(61): /note="Nucleotide may be methylated to form 5-methylcytosine"
cagtctctagagttaagccaggctttggctgacatgaaggaaatggactataggcagtggcgaaagatagctactgaggacctgaagcaaggaggctctctccaggtagagctgacatctcc

SEQ ID NO: 11867 - DNA, 122 bp, Homo sapiens
  misc_feature (61)..(62): /note="This region represents a CpG dinucleotide"
  misc_feature (61)..(61): /note="Nucleotide may be methylated to form 5-methylcytosine"
acagagtgacagggaagccaatgagcttggcaaggctgggtggtgtgatcaaggctggaacgagactggatttcctcagaggaaaggtgagccaaggaggccaagtcagcgtatgtgtagac

SEQ ID NO: 11868 - DNA, 122 bp, Homo sapiens
  misc_feature (61)..(62): /note="This region represents a CpG dinucleotide"
  misc_feature (61)..(61): /note="Nucleotide may be methylated to form 5-methylcytosine"
cttatttaattattgtaatcgcacatgatcttaggctcattgtacatattctgagcaatacgcaattccccagagtgactagtagaataattcaaaccagaacccacgcacttactttctct

SEQ ID NO: 11869 - DNA, 122 bp, Homo sapiens
  misc_feature (61)..(62): /note="This region represents a CpG dinucleotide"
  misc_feature (61)..(61): /note="Nucleotide may be methylated to form 5-methylcytosine"
atataagatgacggtataaacactctctctttcatgtcacagtcacatacaccttagtgacgtgaatcccaagagaaattgttgagcagccacagggcgtgtgtgcttagggaatgagttca

SEQ ID NO: 11870 - DNA, 122 bp, Homo sapiens
  misc_feature (61)..(62): /note="This region represents a CpG dinucleotide"
  misc_feature (61)..(61): /note="Nucleotide may be methylated to form 5-methylcytosine"
ttctgcctgtgccattaactagctacgggacctggagccacaacttccagatctgtgatacgagagagtttagggtttcccagacttgcctgtgtaccaagtgtacttgttaaaaataaata

SEQ ID NO: 11871 - DNA, 122 bp, Homo sapiens
  misc_feature (61)..(62): /note="This region represents a CpG dinucleotide"
  misc_feature (61)..(61): /note="Nucleotide may be methylated to form 5-methylcytosine"
tttagaccttacacaacttctgaatgtaagggtgagcactgtttaccaacttgtagtcaccgaaaagaatatgggtttcgttctgctttaccaacataataaggagaatcttcaaagagaaa

SEQ ID NO: 11872 - DNA, 122 bp, Homo sapiens
  misc_feature (61)..(62): /note="This region represents a CpG dinucleotide"
  misc_feature (61)..(61): /note="Nucleotide may be methylated to form 5-methylcytosine"
cctttgatccttctggatgagggtggctcccaggctgcagggcaccctcaggtgggtgagcgctcacactcccgtcccacttggccaggactcctttccatggctctgcagcttgttcccac

SEQ ID NO: 11873 - DNA, 122 bp, Homo sapiens
  misc_feature (61)..(62): /note="This region represents a CpG dinucleotide"
  misc_feature (61)..(61): /note="Nucleotide may be methylated to form 5-methylcytosine"
ttgcccatctacagcttcctgttggggatttgaacttgacttccaaggtctctgactcaccgatccaaccaaatccactttaatcatttccgattccctctcacatgtccttgggactggat

SEQ ID NO: 11874 - DNA, 122 bp, Homo sapiens
  misc_feature (61)..(62): /note="This region represents a CpG dinucleotide"
  misc_feature (61)..(61): /note="Nucleotide may be methylated to form 5-methylcytosine"
ccccatcccattctatgatcctctgctcgtctctctgaaacattaacaagcactcacatgcggaaaggcttttaagtttataggcgatttcacgtgtcgtatcttagtacttatcaccctgg

SEQ ID NO: 11875 - DNA, 122 bp, Homo sapiens
  misc_feature (61)..(62): /note="This region represents a CpG dinucleotide"
  misc_feature (61)..(61): /note="Nucleotide may be methylated to form 5-methylcytosine"
ctggaaagatgagcctccgcatacctgttacataagacaaagtgtgacaaatgttaggagcgggtaagaaacattatgctgtaaggcttaaggaaaagaaagcaagttactcaagtacaggg

SEQ ID NO: 11876 - DNA, 122 bp, Homo sapiens
  misc_feature (61)..(62): /note="This region represents a CpG dinucleotide"
  misc_feature (61)..(61): /note="Nucleotide may be methylated to form 5-methylcytosine"
ggattctataaagcacgtttgctgtttaacccaggaagacttgcctcagggattaggagacggaacactgcaaaactgttcccaaaactgcaccctaagtgtggttatttcacacccatggc

SEQ ID NO: 11877 - DNA, 122 bp, Homo sapiens
  misc_feature (61)..(62): /note="This region represents a CpG dinucleotide"
  misc_feature (61)..(61): /note="Nucleotide may be methylated to form 5-methylcytosine"
gaaggaaagcatggaaaacaaatagcagctttctcttagaatgcaaagaacagaagctgccgacacctgaaaataaaagctatgccctgtgctttgaggaagaccagagtcagctctgaatc

SEQ ID NO: 11878 - DNA, 122 bp, Homo sapiens
  misc_feature (61)..(62): /note="This region represents a CpG dinucleotide"
  misc_feature (61)..(61): /note="Nucleotide may be methylated to form 5-methylcytosine"
agatttggtgtctggtgagagcgcacctcctggttcacagagggcaccttctcactgagtcgtcacacgatagaagggaaaagagcttcctccaagcctcttgtatacaggcactaatccca

SEQ ID NO: 11879 - DNA, 122 bp, Homo sapiens
  misc_feature (61)..(62): /note="This region represents a CpG dinucleotide"
  misc_feature (61)..(61): /note="Nucleotide may be methylated to form 5-methylcytosine"
ggtccctttttgtgatatgagcatgagaagcacctgtaggcctagtaaaaattcctcatacgagagagatggttagtccagagtaagagaaagctactaagactgaactatatccattcaac

SEQ ID NO: 11880 - DNA, 122 bp, Homo sapiens
  misc_feature (61)..(62): /note="This region represents a CpG dinucleotide"
  misc_feature (61)..(61): /note="Nucleotide may be methylated to form 5-methylcytosine"
ctactatcagtcagtttgaccagagaaacataaacactatgagtaacagagtatggtttacgatagagattatgaggatttatcatagggattagagtatagacagttgtgggagctgttgg

SEQ ID NO: 11881 - DNA, 122 bp, Homo sapiens
  misc_feature (61)..(62): /note="This region represents a CpG dinucleotide"
  misc_feature (61)..(61): /note="Nucleotide may be methylated to form 5-methylcytosine"
taattcttaggtttctagtttgggtgattctcatagtgccaccaactaaaaaagaatatacgagagaagaaacacagaaaatgctaggatttacagacaatgaaacagtcatcctgaaattc

SEQ ID NO: 11882 - DNA, 122 bp, Homo sapiens
  misc_feature (61)..(62): /note="This region represents a CpG dinucleotide"
  misc_feature (61)..(61): /note="Nucleotide may be methylated to form 5-methylcytosine"
tagaactacttatcgaaggagggcatgtagtaggaggagtagctttggggcttgtttgagcggatgaccttgttttcaagtttgcagagaaaatttagggcatgtgatgtaaaccaactgat

SEQ ID NO: 11883 - DNA, 122 bp, Homo sapiens
  misc_feature (61)..(62): /note="This region represents a CpG dinucleotide"
  misc_feature (61)..(61): /note="Nucleotide may be methylated to form 5-methylcytosine"
ctgaaataagctatgtggtgtctataataagagataagctgagaaaactccattgtttcacgctaaatgttctctaatggtatttaagaggaaatcatgtggccagtggtataagggacttg

SEQ ID NO: 11884 - DNA, 122 bp, Homo sapiens
  misc_feature (61)..(62): /note="This region represents a CpG dinucleotide"
  misc_feature (61)..(61): /note="Nucleotide may be methylated to form 5-methylcytosine"
agtcctggtcttcaagtcatagcagcctagaagcctcaggatgattccagccccacctgtcgagtcacctaagcctttgagtcttcccagctgaggtcccggatatcatgcagcagaggcat

SEQ ID NO: 11885 - DNA, 122 bp, Homo sapiens
  misc_feature (61)..(62): /note="This region represents a CpG dinucleotide"
  misc_feature (61)..(61): /note="Nucleotide may be methylated to form 5-methylcytosine"
aggcagtagaaacggcagtactgccacagctggacactcccagcctcccaagcacctacacgtaagtgcctgaggaagtcagtcagtcaagcccaaagggccacaggctttgcagcaggact

SEQ ID NO: 11886 - DNA, 122 bp, Homo sapiens
  misc_feature (61)..(62): /note="This region represents a CpG dinucleotide"
  misc_feature (61)..(61): /note="Nucleotide may be methylated to form 5-methylcytosine"
agagccatggagctggtataagcagattccagccagacagcccaagccagctatgggagccgctactgaaacagatggcaaagaaagcagcctgtgcactcacctctctctgaattgttcct

SEQ ID NO: 11887 - DNA, 122 bp, Homo sapiens
  misc_feature (61)..(62): /note="This region represents a CpG dinucleotide"
  misc_feature (61)..(61): /note="Nucleotide may be methylated to form 5-methylcytosine"
caatgtagaagtgccactgcgctcagttaacccaaagaattgcaagaaataacaaactgtcggctgggcacagtggctcacacctataatcccagcactttgaaaggccgaggcaggtggat

SEQ ID NO: 11888 - DNA, 122 bp, Homo sapiens
  misc_feature (61)..(62): /note="This region represents a CpG dinucleotide"
  misc_feature (61)..(61): /note="Nucleotide may be methylated to form 5-methylcytosine"
aatagccccagcacagcagtgttctgggtgtccagttcccacatttcccgagcagcctgacgcatgccaggtcctatgcaccagggatattaaagtgactcaaggaggcaggaagccattat

SEQ ID NO: 11889 - DNA, 122 bp, Homo sapiens
  misc_feature (61)..(62): /note="This region represents a CpG dinucleotide"
  misc_feature (61)..(61): /note="Nucleotide may be methylated to form 5-methylcytosine"
actgccgcatctcgcgccgcctgcgacggccgccgcacgtgggtcgggcccggaggaactcgctgcgcatcatcttcgccatcgagagcacgtttgtgggctcctggctgcccttcagcgcc

SEQ ID NO: 11890 - DNA, 122 bp, Homo sapiens
  misc_feature (61)..(62): /note="This region represents a CpG dinucleotide"
  misc_feature (61)..(61): /note="Nucleotide may be methylated to form 5-methylcytosine"
gtgagggtgagtggcagccattgaggatgccatggctgtggtgacaggcagctcacactgcgtgtcctctctgcatagcaactcagcatctctgctgcttcctgactcatctgcccttcggc

SEQ ID NO: 11891 - DNA, 122 bp, Homo sapiens
  misc_feature (61)..(62): /note="This region represents a CpG dinucleotide"
  misc_feature (61)..(61): /note="Nucleotide may be methylated to form 5-methylcytosine"
tggcggagggtggggtgaggtggaggtcatgtcgtacatcctcctaagcagacacatggacgtcagaggcaccagagggtttccacattgacctgcagtcacccatttacacatcccccacc

SEQ ID NO: 11892 - DNA, 122 bp, Homo sapiens
  misc_feature (61)..(62): /note="This region represents a CpG dinucleotide"
  misc_feature (61)..(61): /note="Nucleotide may be methylated to form 5-methylcytosine"
ttaaacataaatctgcggtctgttcttagcacctgcggctgcgtgggaggtatggaaaggcgcactttgggtttcgtgaaatctcaagtcaggtcttgacttctctctttccacagattcat

SEQ ID NO: 11893 - DNA, 122 bp, Homo sapiens
  misc_feature (61)..(62): /note="This region represents a CpG dinucleotide"
  misc_feature (61)..(61): /note="Nucleotide may be methylated to form 5-methylcytosine"
gacagcgggtgagtcggggtgggctgtgcacagagagctgagcctgaacacaggccaggtcgtcctagcaggggcaggacatgggctgctgaaggaaaccagtcctccttcaggcccagcag

SEQ ID NO: 11894 - DNA, 122 bp, Homo sapiens
  misc_feature (61)..(62): /note="This region represents a CpG dinucleotide"
  misc_feature (61)..(61): /note="Nucleotide may be methylated to form 5-methylcytosine"
agatcacaatcatgccagactttttacctcattagttttctattgtctgttctgaggcatcgcatacatttctatctccaggcaaaactggttcttgtctgcattgcgtttccatcccttcc

SEQ ID NO: 11895 - DNA, 122 bp, Homo sapiens
  misc_feature (61)..(62): /note="This region represents a CpG dinucleotide"
  misc_feature (61)..(61): /note="Nucleotide may be methylated to form 5-methylcytosine"
gccctctgccagccaggctggggcttggtcacatcctgagtcacatgcttgcatgagtatcgcaagggaggtgcctgcatcattgactgagtctcgatttgtcttccaagaaccaaaccagc

SEQ ID NO: 11896 - DNA, 122 bp, Homo sapiens
  misc_feature (61)..(62): /note="This region represents a CpG dinucleotide"
  misc_feature (61)..(61): /note="Nucleotide may be methylated to form 5-methylcytosine"
aggattcccttggctcaggatctcctggctcttggagacttgcaaaagtcctgatgttggcgtcgatgtctgtaagacaggttgggctggctgctcctggctggcaggctgagtggtataat

SEQ ID NO: 11897 - DNA, 122 bp, Homo sapiens
  misc_feature (61)..(62): /note="This region represents a CpG dinucleotide"
  misc_feature (61)..(61): /note="Nucleotide may be methylated to form 5-methylcytosine"
ctccagggtgttcccagtcattttcacattagcagttgctctgtggtacagacgtggctgcgcctctgtggatcattgaaccttcaccattgccccagcctgcttggggctagggtgtgtgg

SEQ ID NO: 11898 - DNA, 122 bp, Homo sapiens
  misc_feature (61)..(62): /note="This region represents a CpG dinucleotide"
  misc_feature (61)..(61): /note="Nucleotide may be methylated to form 5-methylcytosine"
tttttcagcttctcttcctcaaagagacaaagctgttcctgaaatgaatgggcacatgtacgttgatgatgtatgttggctggccaagtgaaagagagtctcacctgcccattcaggatatg

SEQ ID NO: 11899 - DNA, 122 bp, Homo sapiens
  misc_feature (61)..(62): /note="This region represents a CpG dinucleotide"
  misc_feature (61)..(61): /note="Nucleotide may be methylated to form 5-methylcytosine"
ccagtcttagcgatcagcatcagcaaaggctccgaggtgccagaggcatagtgagttctccgatccctggctggtggagggaagctgggaagggcctggctgtccagggtggtgggaggagg

SEQ ID NO: 11900 - DNA, 122 bp, Homo sapiens
  misc_feature (61)..(62): /note="This region represents a CpG dinucleotide"
  misc_feature (61)..(61): /note="Nucleotide may be methylated to form 5-methylcytosine"
gtaaagtaaagtagaaatgtcctagactagaatgagtcagatgcctctctgacgcaagaacggccttggttgagatcagataacttctagcagaaacctagacttgtgagtaatcagcacat

SEQ ID NO: 11901 - DNA, 122 bp, Homo sapiens
  misc_feature (61)..(62): /note="This region represents a CpG dinucleotide"
  misc_feature (61)..(61): /note="Nucleotide may be methylated to form 5-methylcytosine"
cagtttatccacgagactccattctaaagcatgagtcacacttagtatgcataggtccttcggtttcttgaatcagcttagttttctgctctcatttcacaagaatcactctcttccctcag

SEQ ID NO: 11902 - DNA, 122 bp, Homo sapiens
  misc_feature (61)..(62): /note="This region represents a CpG dinucleotide"
  misc_feature (61)..(61): /note="Nucleotide may be methylated to form 5-methylcytosine"
cattgctttttgatagatctaatggattactgctctgcagccagttcttcatgtgttacccgttaggccagttctgggggaggcatcctcgtctttctttgccatagaacaaacactagtca

SEQ ID NO: 11903 - DNA, 122 bp, Homo sapiens
  misc_feature (61)..(62): /note="This region represents a CpG dinucleotide"
  misc_feature (61)..(61): /note="Nucleotide may be methylated to form 5-methylcytosine"
aaccggaaaatacagactaatcagaggattaggtgaaaagtgctatagaattcagaaaagcgatgtcactgcaggatggagttgctaataatctacagcagtgtgagacaactgtaggaatt

SEQ ID NO: 11904 - DNA, 122 bp, Homo sapiens
  misc_feature (61)..(62): /note="This region represents a CpG dinucleotide"
  misc_feature (61)..(61): /note="Nucleotide may be methylated to form 5-methylcytosine"
cgcttcattttaaacatgttggccaacacaaaatgattcattgatgtcagttacaagtagcgcagaataatagcatcactcctagacgttgtgtcagggctgtgatatgaagcattctaaaa

SEQ ID NO: 11905 - DNA, 122 bp, Homo sapiens
  misc_feature (61)..(62): /note="This region represents a CpG dinucleotide"
  misc_feature (61)..(61): /note="Nucleotide may be methylated to form 5-methylcytosine"
ccagctattctgactcaatagccctggagtgggatccaggaaagtctatttttaaacaagcgtctaaagtgtttctgatgcgggtaaactgagaatcacaaatagagatactccagccagat

SEQ ID NO: 11906 - DNA, 122 bp, Homo sapiens
  misc_feature (61)..(62): /note="This region represents a CpG dinucleotide"
  misc_feature (61)..(61): /note="Nucleotide may be methylated to form 5-methylcytosine"
ttgtataattcagcagctgtttccctcagatgcctaccacacgaggttggattataaagacgtatgagtagaatcgccaaggttcagacacttgtgttcactgttgagctgagagccactta

SEQ ID NO: 11907 - DNA, 122 bp, Homo sapiens
  misc_feature (61)..(62): /note="This region represents a CpG dinucleotide"
  misc_feature (61)..(61): /note="Nucleotide may be methylated to form 5-methylcytosine"
tcacacagtggaagttccctgctttcagtccctgaatagcaaaggctatgccttggccatcgctgctggaagagacacggctcagtgttggatgaatgtcctgactgttttcgccccagaga

SEQ ID NO: 11908 - DNA, 122 bp, Homo sapiens
  misc_feature (61)..(62): /note="This region represents a CpG dinucleotide"
  misc_feature (61)..(61): /note="Nucleotide may be methylated to form 5-methylcytosine"
agcctcaaccaggtgctctgtgatgtccctgtcatagctaagaagccaacaccatttaagcgttgggacgaagtgactcatggagacactttgccttttgctgggaattacctgatgacgca

SEQ ID NO: 11909 - DNA, 122 bp, Homo sapiens
  misc_feature (61)..(62): /note="This region represents a CpG dinucleotide"
  misc_feature (61)..(61): /note="Nucleotide may be methylated to form 5-methylcytosine"
cccattatggagattaaccacttttcatcaggtttttaacttaagtcgtgaggaatacaacggtgaacacaaggtgtgtatgtgaattaatttagtagtaaactatgacatggaggggttct

SEQ ID NO: 11910 - DNA, 122 bp, Homo sapiens
  misc_feature (61)..(62): /note="This region represents a CpG dinucleotide"
  misc_feature (61)..(61): /note="Nucleotide may be methylated to form 5-methylcytosine"
atcacccacctcaactccagagctcaggctgtgggagactataaattaagggcacagggccgggcatggtggctcacacctataataacactttgggaggctgaggcaggtgaattacctga

SEQ ID NO: 11911 - DNA, 122 bp, Homo sapiens
  misc_feature (61)..(62): /note="This region represents a CpG dinucleotide"
  misc_feature (61)..(61): /note="Nucleotide may be methylated to form 5-methylcytosine"
gaagccatttcatcgataacatcatgctgatcaggtaggatgagcacaaagtggctggtgcgcaggaggccaacttcagaaaatgatattctagttctactgctgtggctctgaatttctca

SEQ ID NO: 11912 - DNA, 122 bp, Homo sapiens
  misc_feature (61)..(62): /note="This region represents a CpG dinucleotide"
  misc_feature (61)..(61): /note="Nucleotide may be methylated to form 5-methylcytosine"
aagtcctgtatatgtatgtagtagtttgggtgtgtatatatagtagcatttcaaaatggacgtactggtttaacctcctatccttggagagcagctggctctccaccttgttacacattatg

SEQ ID NO: 11913 - DNA, 122 bp, Homo sapiens
  misc_feature (61)..(62): /note="This region represents a CpG dinucleotide"
  misc_feature (61)..(61): /note="Nucleotide may be methylated to form 5-methylcytosine"
aggcccggttagatggcaaggagcctcaggtcatggggaccttgccacagacaacagttacgtggaaaaaaacatggtgggaaagggggcttatgaacagtcccgtcttccaggctggatat

SEQ ID NO: 11914 - DNA, 122 bp, Homo sapiens
  misc_feature (61)..(62): /note="This region represents a CpG dinucleotide"
  misc_feature (61)..(61): /note="Nucleotide may be methylated to form 5-methylcytosine"
tgctcctctggaggagaggcctggctgggtgtggggctgggtggggcctggctgggacggcgcagagagcatgggctctgaattaggaggatctggtggacctttccttgtgcctttacccc

SEQ ID NO: 11915 - DNA, 122 bp, Homo sapiens
  misc_feature (61)..(62): /note="This region represents a CpG dinucleotide"
  misc_feature (61)..(61): /note="Nucleotide may be methylated to form 5-methylcytosine"
cttcctgtgaggtgtcatcagcagcacaagatcagacatagccaggtctacacaggcttgcgtctttccacaagttcactttattgatgcttactcaattagaaaagtcatgagccaggcgt

SEQ ID NO: 11916 - DNA, 122 bp, Homo sapiens
  misc_feature (61)..(62): /note="This region represents a CpG dinucleotide"
  misc_feature (61)..(61): /note="Nucleotide may be methylated to form 5-methylcytosine"
ggtgaacacccaaatcctgccctacccaaatccagaaccaggaggcggggagagaacaggcggcctcccaaggaaggactcaccctgcttggccatgcaggaggaggaaggctggcctgaga

SEQ ID NO: 11917 - DNA, 122 bp, Homo sapiens
  misc_feature (61)..(62): /note="This region represents a CpG dinucleotide"
  misc_feature (61)..(61): /note="Nucleotide may be methylated to form 5-methylcytosine"
ttagtggaaggaaatatcacccaaggactgcaatactataggtgcgtctgtgattagtcacggagcatatttgagtactgagacctaattgcaggcctaaggtcaaggaatacagggttgta

SEQ ID NO: 11918 - DNA, 122 bp, Homo sapiens
  misc_feature (61)..(62): /note="This region represents a CpG dinucleotide"
  misc_feature (61)..(61): /note="Nucleotide may be methylated to form 5-methylcytosine"
agtgatccacccacctcagcctcccaaagtgctgggattacaggcgtgagccaccacacccggcctgtaagctatattaaagagtttaaacctaatgctaagagcagtaaaatgccattgaa

SEQ ID NO: 11919 - DNA, 122 bp, Homo sapiens
  misc_feature (61)..(62): /note="This region represents a CpG dinucleotide"
  misc_feature (61)..(61): /note="Nucleotide may be methylated to form 5-methylcytosine"
tcctctgaaatccatggtgtgtcatcagtacatgtcttcacccggattgactaacatgttcgttcctaacttacctctgctataatcgggtaggctccgtgggcacagtaactattttgtta

SEQ ID NO: 11920 - DNA, 122 bp, Homo sapiens
  misc_feature (61)..(62): /note="This region represents a CpG dinucleotide"
  misc_feature (61)..(61): /note="Nucleotide may be methylated to form 5-methylcytosine"
ccatttcctgataagcacagaaacaagaacgctttgtctcctgaggctggagctgagcagcggattctatttgttagggggcctcagaaagaaactgcccagtgcccctaagaatatttctc

SEQ ID NO: 11921 - DNA, 122 bp, Homo sapiens
  misc_feature (61)..(62): /note="This region represents a CpG dinucleotide"
  misc_feature (61)..(61): /note="Nucleotide may be methylated to form 5-methylcytosine"
gctgaccgctgagctcacttgcaggtcaatgtgtcctggggcttgcttgttgaacactaacgtgtgtgcaggttgcaggggtaagggtggggggcgggtgcacctcactctgagcccgcttc

SEQ ID NO: 11922 - DNA, 122 bp, Homo sapiens
  misc_feature (61)..(62): /note="This region represents a CpG dinucleotide"
  misc_feature (61)..(61): /note="Nucleotide may be methylated to form 5-methylcytosine"
agtttatttgagcattcagctatttgtggatggggcagtaccagaccacaggtggtttagcgctccaccaagaaggtaagggaaactttttgaaggtgttcatagaagtaaggcaaattaaa

SEQ ID NO: 11923 - DNA, 122 bp, Homo sapiens
  misc_feature (61)..(62): /note="This region represents a CpG dinucleotide"
  misc_feature (61)..(61): /note="Nucleotide may be methylated to form 5-methylcytosine"
tgatcttgtgatccacccatctgggcctcccacagtgctgggattacaggcatgagccaccgggcccggcctaaagaaacctcttaaggatgggggagattataaaaaacattgatcagtta

SEQ ID NO: 11924 - DNA, 122 bp, Homo sapiens
  misc_feature (61)..(62): /note="This region represents a CpG dinucleotide"
  misc_feature (61)..(61): /note="Nucleotide may be methylated to form 5-methylcytosine"
tgaagtgttggaagtatcttcccaggtggcttcttgggcaacaggaagcaagacagcttacggtcaaagagcttgagtgtttgtgccagacaaatctggcttgggtcctggctgtgctgctt

SEQ ID NO: 11925 - DNA, 122 bp, Homo sapiens
  misc_feature (61)..(62): /note="This region represents a CpG dinucleotide"
  misc_feature (61)..(61): /note="Nucleotide may be methylated to form 5-methylcytosine"
gtctgactgggagtggaggatccaattctaagacagctcattcattcacatggctgttagcgggaggcctcagctactcatcacataagcctttccacatagtttcttaggcaacatcataa

SEQ ID NO: 11926 - DNA, 122 bp, Homo sapiens
  misc_feature (61)..(62): /note="This region represents a CpG dinucleotide"
  misc_feature (61)..(61): /note="Nucleotide may be methylated to form 5-methylcytosine"
ttacttgtggaattcttcaatgacagttgacactcccatatataagctccaggcagagaccgtgtctatattctcacctttgcacaacatctagctcagagccacaaaaagtaggcactcat

SEQ ID NO: 11927 - DNA, 122 bp, Homo sapiens
  misc_feature (61)..(62): /note="This region represents a CpG dinucleotide"
  misc_feature (61)..(61): /note="Nucleotide may be methylated to form 5-methylcytosine"
aaaatccatgacaaacaaagtataaaacatggattaaagatgggctgctgtttgtgttttcggacctgcatgattgtgcaatggcaacagttgtttccagtcagcccggggctcctcagtct

SEQ ID NO: 11928 - DNA, 122 bp, Homo sapiens
  misc_feature (61)..(62): /note="This region represents a CpG dinucleotide"
  misc_feature (61)..(61): /note="Nucleotide may be methylated to form 5-methylcytosine"
ggggtgccaggcttttcctgaataattgagaaatgatcagatgatctaccctttgactgacgtatactggtatatgcattactattgctcttcgagtgactgtactggcttactcatttctt

SEQ ID NO: 11929 - DNA, 122 bp, Homo sapiens
  misc_feature (61)..(62): /note="This region represents a CpG dinucleotide"
  misc_feature (61)..(61): /note="Nucleotide may be methylated to form 5-methylcytosine"
agagcttgactcacatcacagggagccctggggctcattccatgtccacatgttgccacacggttcccatgtcctaggctgcatatgtgtagctccacaaggaaggcctctgcatgctccat

SEQ ID NO: 11930 - DNA, 122 bp, Homo sapiens
  misc_feature (61)..(62): /note="This region represents a CpG dinucleotide"
  misc_feature (61)..(61): /note="Nucleotide may be methylated to form 5-methylcytosine"
cctcagagctttgtgaatgtctcctgtttcagatctgatctcttgtatcctagccacactcgtatctcagaaacctgagaatcaaagtccttgctggtatattgatttttatgaattgcaaa

SEQ ID NO: 11931 - DNA, 122 bp, Homo sapiens
  misc_feature (61)..(62): /note="This region represents a CpG dinucleotide"
  misc_feature (61)..(61): /note="Nucleotide may be methylated to form 5-methylcytosine"
atatgggtcactgagcacagccttgtccctctcacttctctgcgtttggtcttcacatcacggcacattttcagttgatgcctacttgcagtatcaggatgtgtggcaatctgggaagcaac

SEQ ID NO: 11932 - DNA, 122 bp, Homo sapiens
  misc_feature (61)..(62): /note="This region represents a CpG dinucleotide"
  misc_feature (61)..(61): /note="Nucleotide may be methylated to form 5-methylcytosine"
gtacgatgattttgtccatttatgtgaaagttagggtggggtggcctaatgttttcacagcggctatggtaacatttttgtaaattcagaactgctactgtgaatttcaggattttacagaa

SEQ ID NO: 11933 - DNA, 122 bp, Homo sapiens
  misc_feature (61)..(62): /note="This region represents a CpG dinucleotide"
  misc_feature (61)..(61): /note="Nucleotide may be methylated to form 5-methylcytosine"
catctagtcatcggtcttgcggttgcatgccatgtgccttttcctgacagtggatgaactcggaagtggtccaccctagagggcacctggggtgacggaaccttctgctgggggacaatgag

SEQ ID NO: 11934 - DNA, 122 bp, Homo sapiens
  misc_feature (61)..(62): /note="This region represents a CpG dinucleotide"
  misc_feature (61)..(61): /note="Nucleotide may be methylated to form 5-methylcytosine"
cagagatgtcctcaaacactgcctttcagaaaagcagattgctatctggatgatgacatccgtatgtgtagcagccctgtggctattagtttcttacattttgtgatggattttacgattga

SEQ ID NO: 11935 - DNA, 122 bp, Homo sapiens
  misc_feature (61)..(62): /note="This region represents a CpG dinucleotide"
  misc_feature (61)..(61): /note="Nucleotide may be methylated to form 5-methylcytosine"
catgaactcctgcctcatgaacccctatctgagataaaatctttaaccctggacaccacacgataagaaaaatgatgtctaagcagactactctgtgagagagagagagagacagaaaaggc

SEQ ID NO: 11936 - DNA, 122 bp, Homo sapiens
  misc_feature (61)..(62): /note="This region represents a CpG dinucleotide"
  misc_feature (61)..(61): /note="Nucleotide may be methylated to form 5-methylcytosine"
tcattgacgaagatgaacacgatgctcacctctggcaggctgtcaggaaatgagaggttacggcacctgcaaagaacagccaagcgcttagatttgtgactcagctggagtcatctcaggag

SEQ ID NO: 11937 - DNA, 122 bp, Homo sapiens
  misc_feature (61)..(62): /note="This region represents a CpG dinucleotide"
  misc_feature (61)..(61): /note="Nucleotide may be methylated to form 5-methylcytosine"
ccaggttgacaacataacccaactaataccaacaacataaagtgcctgagttcaccagcccgctcagctcccagctgactgccccggagtcccgccctgttcaggcagaggcagagtttttt

SEQ ID NO: 11938 - DNA, 122 bp, Homo sapiens
  misc_feature (61)..(62): /note="This region represents a CpG dinucleotide"
  misc_feature (61)..(61): /note="Nucleotide may be methylated to form 5-methylcytosine"
agcaaactccaaataattcagtattgcagaatgagaaggcaagggtggggatggccagaacggagtgactgtggagatggacacagtcatatcacaaagggttctttaagccctgctgtgca

SEQ ID NO: 11939 - DNA, 122 bp, Homo sapiens
  misc_feature (61)..(62): /note="This region represents a CpG dinucleotide"
  misc_feature (61)..(61): /note="Nucleotide may be methylated to form 5-methylcytosine"
cagtaaagttcagtctagggttaataaaagattctagggttcactaagacaaagagtagtcgcagtagcagagccttgggtgaagctaaggtccccaggagatctgggatgtctgtgaggaa

SEQ ID NO: 11940 - DNA, 122 bp, Homo sapiens
  misc_feature (61)..(62): /note="This region represents a CpG dinucleotide"
  misc_feature (61)..(61): /note="Nucleotide may be methylated to form 5-methylcytosine"
tcctaccttatgtggatgggttccatcttattttcaatgtcctcctgttgcagaagcttccggttagtcctgggactaaagggcaattgacctcactcctcctgggtctgactgactaatct

SEQ ID NO: 11941 - DNA, 122 bp, Homo sapiens
  misc_feature (61)..(62): /note="This region represents a CpG dinucleotide"
  misc_feature (61)..(61): /note="Nucleotide may be methylated to form 5-methylcytosine"
acaaatctgtgttttagaaaaatcacattggctacactccaggaagcagtcgaacaacagcgaaagcttttgggaaactgtaatcccatagaaagacaaaggattataagtattatggaaag

SEQ ID NO: 11942 - DNA, 122 bp, Homo sapiens
  misc_feature (61)..(62): /note="This region represents a CpG dinucleotide"
  misc_feature (61)..(61): /note="Nucleotide may be methylated to form 5-methylcytosine"
tcagacttctatagtgtttcctaacattttacttatagccccattatgaacttcacagttcgtagttcaaagtcacacagttagttatcttcttgtcctagtgatgctgctcaagccattgc

SEQ ID NO: 11943 - DNA, 122 bp, Homo sapiens
  misc_feature (61)..(62): /note="This region represents a CpG dinucleotide"
  misc_feature (61)..(61): /note="Nucleotide may be methylated to form 5-methylcytosine"
tcattgattcacagtccagaagctgggagtaatgtctgctgcagatttctgtattgtttccgtaatgaagctgacagcagcataatatctgtagcctgtgctaagataggagttgggtgtca

SEQ ID NO: 11944 - DNA, 122 bp, Homo sapiens
  misc_feature (61)..(62): /note="This region represents a CpG dinucleotide"
  misc_feature (61)..(61): /note="Nucleotide may be methylated to form 5-methylcytosine"
ttgactcaggaggtaaaaatgtcaacaggccacaacctccagggctcctggaattggagacgaagccagttctgagcttatgcaaccataggacagtgagagagggccatggactcgattta

SEQ ID NO: 11945 - DNA, 122 bp, Homo sapiens
  misc_feature (61)..(62): /note="This region represents a CpG dinucleotide"
  misc_feature (61)..(61): /note="Nucleotide may be methylated to form 5-methylcytosine"
tgtgggagaacaaactaactgagctgcctctcacctaggatactcctacagcccaaactacgagttcaagagaattctatcttggaaaggactgagtcttattagactgcttatccctaata

SEQ ID NO: 11946 - DNA, 122 bp, Homo sapiens
  misc_feature (61)..(62): /note="This region represents a CpG dinucleotide"
  misc_feature (61)..(61): /note="Nucleotide may be methylated to form 5-methylcytosine"
ttaccttcatctccattttcagccattgccaagagcagcagactcctgagggtgagtcaacgggcaagccagctgagccagcactgtccctcccttacgccatccttccaccccatgtcctg

SEQ ID NO: 11947 - DNA, 122 bp, Homo sapiens
  misc_feature (61)..(62): /note="This region represents a CpG dinucleotide"
  misc_feature (61)..(61): /note="Nucleotide may be methylated to form 5-methylcytosine"
accgcctcccaggggctgtctgatcaccctgacctgccttccgcaagaattctgtgaggtcggtttagccagaatccctctgacccctgatgtctcctcttagtcattttccatccactgac

SEQ ID NO: 11948 - DNA, 122 bp, Homo sapiens
  misc_feature (61)..(62): /note="This region represents a CpG dinucleotide"
  misc_feature (61)..(61): /note="Nucleotide may be methylated to form 5-methylcytosine"
ttgtactcaatctgtcaggaaatcttgttggctatacctttaaaacatctctctcacctacgcactctcccaccttgactgatacaagcctaaactaagcaccaccaggtcttgctttgatg

SEQ ID NO: 11949 - DNA, 122 bp, Homo sapiens
  misc_feature (61)..(62): /note="This region represents a CpG dinucleotide"
  misc_feature (61)..(61): /note="Nucleotide may be methylated to form 5-methylcytosine"
gaggcatgatggagaacagccagtccttgggcttcgtgataagaaaggtctttttaatgacggaaagcaaaataccacagcaattacccggggtcaggtatggaaagtactcatgagactcc

SEQ ID NO: 11950 - DNA, 122 bp, Homo sapiens
  misc_feature (61)..(62): /note="This region represents a CpG dinucleotide"
  misc_feature (61)..(61): /note="Nucleotide may be methylated to form 5-methylcytosine"
cagccagatcccatctgcaaacacaccaaagctttattcaacaggcgtggcttcctgaagcgtaaagccacttcacagacggtggccacagcggcacctcggccagagccatgcggccatca

SEQ ID NO: 11951 - DNA, 122 bp, Homo sapiens
  misc_feature (61)..(62): /note="This region represents a CpG dinucleotide"
  misc_feature (61)..(61): /note="Nucleotide may be methylated to form 5-methylcytosine"
tctgtgaaaggaacaaaaagctatctggttaacaagctcaaaggctgattaggatcattacgcaacttgtaacattttcacatgggtgtggtagtctcacgagctgagcctgttctcctctt

SEQ ID NO: 11952 - DNA, 122 bp, Homo sapiens
  misc_feature (61)..(62): /note="This region represents a CpG dinucleotide"
  misc_feature (61)..(61): /note="Nucleotide may be methylated to form 5-methylcytosine"
tagctaatgtgaaacagagcacaggacttgtctaacaaggaatttgcatattctcatccacgtagcctggtgtaggttctgcctggggccatgggtaatgaatgcctgcacagcctctccag

SEQ ID NO: 11953 - DNA, 122 bp, Homo sapiens
  misc_feature (61)..(62): /note="This region represents a CpG dinucleotide"
  misc_feature (61)..(61): /note="Nucleotide may be methylated to form 5-methylcytosine"
atgtagaaatgactgtagttctcccctcatccaacataaaagcatagggattaaacaatacgactaatgtccagaattcacagatggcacagatggcaatgacacattccctcacctgtgtg

SEQ ID NO: 11954 - DNA, 122 bp, Homo sapiens
  misc_feature (61)..(62): /note="This region represents a CpG dinucleotide"
  misc_feature (61)..(61): /note="Nucleotide may be methylated to form 5-methylcytosine"
attcttcaaatgtgaaacatatcatgtcagcctaggcccctgatcatgactatgtgaatacgttaaaactgccaggcctggcgtggtggcttactctggtaatcccagcactttgggagact

SEQ ID NO: 11955 - DNA, 122 bp, Homo sapiens
  misc_feature (61)..(62): /note="This region represents a CpG dinucleotide"
  misc_feature (61)..(61): /note="Nucleotide may be methylated to form 5-methylcytosine"
caggaagaggctgctttagtgatgagtgtggcagaggaggagctgtctcatactagcctgcggatttcctttatggagtaaatcctttaagattcttctcaagagctgggcgcagtgtctta

SEQ ID NO: 11956 - DNA, 122 bp, Homo sapiens
  misc_feature (61)..(62): /note="This region represents a CpG dinucleotide"
  misc_feature (61)..(61): /note="Nucleotide may be methylated to form 5-methylcytosine"
tttctgaaatttgttaccaggtgaactctgtgtaggcaagtatggaggctcttctaattacggattacaagcaagaatgactacctagatcagagttgatataagcgatgcccaaccattca

SEQ ID NO: 11957 - DNA, 122 bp, Homo sapiens
  misc_feature (61)..(62): /note="This region represents a CpG dinucleotide"
  misc_feature (61)..(61): /note="Nucleotide may be methylated to form 5-methylcytosine"
gcaggactcagagcccatcaaaacatggatttcatagcttggcgtctggctgctaagcaacgcacttcttacattcaaaacagagttgtaaaagtagaatcttggtgccaactctgggtatt

SEQ ID NO: 11958 - DNA, 122 bp, Homo sapiens
  misc_feature (61)..(62): /note="This region represents a CpG dinucleotide"
  misc_feature (61)..(61): /note="Nucleotide may be methylated to form 5-methylcytosine"
ttatttatttatttaattcctcttctccctcaaagcacaatctgctgtatgttaaaggggcggggaagctgctgactttgcagtagcgcatacttactcacgcaattttccattctggctga

SEQ ID NO: 11959 - DNA, 122 bp, Homo sapiens
  misc_feature (61)..(62): /note="This region represents a CpG dinucleotide"
  misc_feature (61)..(61): /note="Nucleotide may be methylated to form 5-methylcytosine"
tccccagatggggtgagggtgggctggtgcagtggcccagccttggggcgtcaggtaggccgccaacccttgagttgagtcacatagggaaggcaccgggaaggaggcattgcaacagagga

SEQ ID NO: 11960 - DNA, 122 bp, Homo sapiens
  misc_feature (61)..(62): /note="This region represents a CpG dinucleotide"
  misc_feature (61)..(61): /note="Nucleotide may be methylated to form 5-methylcytosine"
ggcacctagggacagccacactctgtgtccacgcacctagggacggccacaccttgtccacgcaccgagggacagccacacctgtatccacacacctaaggatggccacacctgtgtccacg

SEQ ID NO: 11961 - DNA, 122 bp, Homo sapiens
  misc_feature (61)..(62): /note="This region represents a CpG dinucleotide"
  misc_feature (61)..(61): /note="Nucleotide may be methylated to form 5-methylcytosine"
actggtaagggtgaccttcttgattcattctgttgtcccaaatgctaatctcttccaggacgctctcacagacacacccagaaatgatgttttacccactgagccttccttaacaggatcat

SEQ ID NO: 11962 - DNA, 122 bp, Homo sapiens
  misc_feature (61)..(62): /note="This region represents a CpG dinucleotide"
  misc_feature (61)..(61): /note="Nucleotide may be methylated to form 5-methylcytosine"
tcatgaattgcttcctgtatgttcatgaattacttcctgtgtgctcatgaactgcttcctcgtgtgtctcctccatctagtgtatgaaaccctaaagagaacagagctcatcccgtattgct

SEQ ID NO: 11963 - DNA, 122 bp, Homo sapiens
  misc_feature (61)..(62): /note="This region represents a CpG dinucleotide"
  misc_feature (61)..(61): /note="Nucleotide may be methylated to form 5-methylcytosine"
tggcactcagtgcccatctgccggatctcctccgtcgtctccttcaggcatttctcagtccggccccagagaacaatctggaagaagataataacaacgcagaacaaatggtcattaagcca

SEQ ID NO: 11964 - DNA, 122 bp, Homo sapiens
  misc_feature (61)..(62): /note="This region represents a CpG dinucleotide"
  misc_feature (61)..(61): /note="Nucleotide may be methylated to form 5-methylcytosine"
tattaggtcaaatgctttgtaaagttccttccagttctgaagctctatggttgtaagcctcgccttggcttgactgcacggctttaaagtacgaatctgttcacaggttgtccatgattaaa

SEQ ID NO: 11965 - DNA, 122 bp, Homo sapiens
  misc_feature (61)..(62): /note="This region represents a CpG dinucleotide"
  misc_feature (61)..(61): /note="Nucleotide may be methylated to form 5-methylcytosine"
attcaggagcggcttcaagatccaagcgtcctgggagaagcagcaatccctcttcctgggcgcagagatgctggtttaacacagtcatgtgtcagagaaaactagtttttcctgcaggccca

SEQ ID NO: 11966 - DNA, 122 bp, Homo sapiens
  misc_feature (61)..(62): /note="This region represents a CpG dinucleotide"
  misc_feature (61)..(61): /note="Nucleotide may be methylated to form 5-methylcytosine"
actgcccccttgcctggcccaccccgtggagaggtcacaagcttcagcatcagacagggccggggtcaagtccagctttggcattagctaagctgcatgaccttaagcaacccatgttaaac

SEQ ID NO: 11967 - DNA, 122 bp, Homo sapiens
  misc_feature (61)..(62): /note="This region represents a CpG dinucleotide"
  misc_feature (61)..(61): /note="Nucleotide may be methylated to form 5-methylcytosine"
ttgatttacaaaactaataaattctggctaggggtgagtcacagtgttattactcccttacggtcttaaggtggctccacagtctgcattaaggagtctggatctttaaagtggcattcagg

SEQ ID NO: 11968 - DNA, 122 bp, Homo sapiens
  misc_feature (61)..(62): /note="This region represents a CpG dinucleotide"
  misc_feature (61)..(61): /note="Nucleotide may be methylated to form 5-methylcytosine"
tacaaagtaaaaatatttacgagagctaaatcagcaaaatgatcaaacataaacattccccgtacatctattctgtttacatatcactcagacaagtgtaaataatcttaatactctgaaga

SEQ ID NO: 11969 - DNA, 122 bp, Homo sapiens
  misc_feature (61)..(62): /note="This region represents a CpG dinucleotide"
  misc_feature (61)..(61): /note="Nucleotide may be methylated to form 5-methylcytosine"
ctcggtgtttctctacacttagtgaagactatataaccatggctctattataatacaatacgttataataagatctaggggcattctcgagaacttgggagcaatctaagaaaggagagtga

SEQ ID NO: 11970 - DNA, 122 bp, Homo sapiens
  misc_feature (61)..(62): /note="This region represents a CpG dinucleotide"
  misc_feature (61)..(61): /note="Nucleotide may be methylated to form 5-methylcytosine"
gcactgccagattagaatgcctcaaaggcctaatgactcctaagtggctcaccgtcagctcggtacagctaagcaattcccatgctgctcaggagtcatgtattatgctggcaggctgcctc

SEQ ID NO: 11971 - DNA, 122 bp, Homo sapiens
  misc_feature (61)..(62): /note="This region represents a CpG dinucleotide"
  misc_feature (61)..(61): /note="Nucleotide may be methylated to form 5-methylcytosine"
agctccacagctggaatgcagctgcttggggtggagcaaacataactccctataggtcagcgggtgagggagggcagggaatcttggaaggttgggaaagtccttctaaagccagagctcag

SEQ ID NO: 11972 - DNA, 122 bp, Homo sapiens
  misc_feature (61)..(62): /note="This region represents a CpG dinucleotide"
  misc_feature (61)..(61): /note="Nucleotide may be methylated to form 5-methylcytosine"
cccacgcttgcaactgagaaactttcgtaacctgcttaagaaagcagtggctcttgcctccgccctccgtgacatcctgcctttttcattaggaacgacccatgcttgcaactgagaaagtt

SEQ ID NO: 11973 - DNA, 122 bp, Homo sapiens
  misc_feature (61)..(62): /note="This region represents a CpG dinucleotide"
  misc_feature (61)..(61): /note="Nucleotide may be methylated to form 5-methylcytosine"
agtttcaacacagggcatttcaaatcctctttccaagaccatgatgggtgctccaaagtacgtagtctttcaaaacacactgaactggtttggatgagttgaaaactccaggttactgtgaa

SEQ ID NO: 11974 - DNA, 122 bp, Homo sapiens
  misc_feature (61)..(62): /note="This region represents a CpG dinucleotide"
  misc_feature (61)..(61): /note="Nucleotide may be methylated to form 5-methylcytosine"
agatgcttattttggaaggttttgtagggttgacgtggaggtagaatgagacaatgctagcgtagaatcctgtgagtgatttttatgtttcgttgttgttgttgttgtttttggctatcatt

SEQ ID NO: 11975 - DNA, 122 bp, Homo sapiens
  misc_feature (61)..(62): /note="This region represents a CpG dinucleotide"
  misc_feature (61)..(61): /note="Nucleotide may be methylated to form 5-methylcytosine"
ttccttaaggctgagccctagtgtgactttcagtcagaaatgggttatactgtggccaggcgtggtggctcacgcctgtaatcccagcactgtgggaggctgaggtgggctgatcacttgag

SEQ ID NO: 11976 - DNA, 122 bp, Homo sapiens
  misc_feature (61)..(62): /note="This region represents a CpG dinucleotide"
  misc_feature (61)..(61): /note="Nucleotide may be methylated to form 5-methylcytosine"
gtcgtggcggatacaatattgagatctccaggcttagcagaccacgagtgctgcgtgcttcgcgatggaaacaggtgtgaacctgagatggcagtgatcacatgagtgggggcctgttgatg

SEQ ID NO: 11977 - DNA, 122 bp, Homo sapiens
  misc_feature (61)..(62): /note="This region represents a CpG dinucleotide"
  misc_feature (61)..(61): /note="Nucleotide may be methylated to form 5-methylcytosine"
atgtcacgactaacagatcactccaggcatagtagttctcatcggctcaatgaacagtcacgacatagcagcatcagagatctcagtaataatcccatgactcatatcacacatggcaccag

SEQ ID NO: 11978 - DNA, 122 bp, Homo sapiens
  misc_feature (61)..(62): /note="This region represents a CpG dinucleotide"
  misc_feature (61)..(61): /note="Nucleotide may be methylated to form 5-methylcytosine"
tcacttattatggagtccaacacaaacacctttgttcattttgttcacttgcttgctgaccgctgaatcatttccttttccttagcttagttgcttaaggcaattttaaaaaacattgggtt

SEQ ID NO: 11979 - DNA, 122 bp, Homo sapiens
  misc_feature (61)..(62): /note="This region represents a CpG dinucleotide"
  misc_feature (61)..(61): /note="Nucleotide may be methylated to form 5-methylcytosine"
cagtgaatggaatgttcagtcaatgttgggcactgctgcacagagcaatgacatcactaccgtcatcatcatcatcatgatctctgaagcattcttaaatgccgaaagatgtactcacaaaa

SEQ ID NO: 11980 - DNA, 122 bp, Homo sapiens
  misc_feature (61)..(62): /note="This region represents a CpG dinucleotide"
  misc_feature (61)..(61): /note="Nucleotide may be methylated to form 5-methylcytosine"
gcttcaaatccagccataagctgataattgcagttcataagtatgataattgggtgctcacgcatgcgtgtgtgagatgtgtcaccctcaaaccttgttatgacgtcagcacattacccgtc

SEQ ID NO: 11981 - DNA, 122 bp, Homo sapiens
  misc_feature (61)..(62): /note="This region represents a CpG dinucleotide"
  misc_feature (61)..(61): /note="Nucleotide may be methylated to form 5-methylcytosine"
ccacagtcaccctggctttctacctgagggtgcatagtgacacggagcccatacagagtacgtctgtgtcactgggtggagcaaacagttgaatttagggctgctgagattggatacagcag

SEQ ID NO: 11982 - DNA, 122 bp, Homo sapiens
  misc_feature (61)..(62): /note="This region represents a CpG dinucleotide"
  misc_feature (61)..(61): /note="Nucleotide may be methylated to form 5-methylcytosine"
tgtctttgtctgttcccagtgataatgtccctgtaaaacactatagctaatctaatattgcgtggtttcttaagccttggatcctttatgaccagctgccatgtaagatgattcagtatcta

SEQ ID NO: 11983 - DNA, 122 bp, Homo sapiens
  misc_feature (61)..(62): /note="This region represents a CpG dinucleotide"
  misc_feature (61)..(61): /note="Nucleotide may be methylated to form 5-methylcytosine"
tgatgaggcccattcccacagggctggtaaacagcaatctaggacaattgagggagacagcggtagcactgcaaacacaggtgtcagagttttaatcccagctctgtgcctaatttgctatt

SEQ ID NO: 11984 - DNA, 122 bp, Homo sapiens
  misc_feature (61)..(62): /note="This region represents a CpG dinucleotide"
  misc_feature (61)..(61): /note="Nucleotide may be methylated to form 5-methylcytosine"
cacataatgagacaaagcaactcatcacaggataagaataaaaatcaagtggactgatggcgttgagtgtcacatgaggcttagattttgggatcagcagcatcaacatcaccttcaagctt

SEQ ID NO: 11985 - DNA, 122 bp, Homo sapiens
  misc_feature (61)..(62): /note="This region represents a CpG dinucleotide"
  misc_feature (61)..(61): /note="Nucleotide may be methylated to form 5-methylcytosine"
gagtcagttaatatgctagttctctcttaccacacagttaaaacaagtttggatacaagacgtagtaaattataagcagaggacaggtgagctatttgtgtgaacacagctgaaggcctggg

SEQ ID NO: 11986 - DNA, 122 bp, Homo sapiens
  misc_feature (61)..(62): /note="This region represents a CpG dinucleotide"
  misc_feature (61)..(61): /note="Nucleotide may be methylated to form 5-methylcytosine"
ctgccacagattatgtaataatggccaggtgttgcgcatgcccactatgggctggcctagcgtataggcctcaataaagccattcacatatgtggggacttgcttgtacatctgaagaatga

SEQ ID NO: 11987 - DNA, 122 bp, Homo sapiens
  misc_feature (61)..(62): /note="This region represents a CpG dinucleotide"
  misc_feature (61)..(61): /note="Nucleotide may be methylated to form 5-methylcytosine"
ccttaaccaggagggcagctccctgaaggtgggacagggtgcccgccaccctgtctgatacgtgctttgcagataaggtggctcaccccatctgaccagctgccaccagctcctttgtaagg

SEQ ID NO: 11988 - DNA, 122 bp, Homo sapiens
  misc_feature (61)..(62): /note="This region represents a CpG dinucleotide"
  misc_feature (61)..(61): /note="Nucleotide may be methylated to form 5-methylcytosine"
tctgcatgttcagcagaagctagatatgtccctgctttgcaacaactggtaatggtgagtcggctgtgtaaggtcaagtgctactcccatatgcatggaatgctttctgatgatcacaactg

SEQ ID NO: 11989 - DNA, 122 bp, Homo sapiens
  misc_feature (61)..(62): /note="This region represents a CpG dinucleotide"
  misc_feature (61)..(61): /note="Nucleotide may be methylated to form 5-methylcytosine"
gtggggccctgaaggccgtgctcaagaatgtggatcctttcctgcagacattgggcgtggcgtgatccaacctgtgttccatgagcacatttcctaggctgatctttctcaagcctccccat

SEQ ID NO: 11990 - DNA, 122 bp, Homo sapiens
  misc_feature (61)..(62): /note="This region represents a CpG dinucleotide"
  misc_feature (61)..(61): /note="Nucleotide may be methylated to form 5-methylcytosine"
ctgcagttgtgtctggaaagagcaggcaatcaaatgggattttggagctgaatcattcaccgcccagctagcaatgtggacaccttgcacagatggtgtttccattgttaaaacttccactg

SEQ ID NO: 11991 - DNA, 122 bp, Homo sapiens
  misc_feature (61)..(62): /note="This region represents a CpG dinucleotide"
  misc_feature (61)..(61): /note="Nucleotide may be methylated to form 5-methylcytosine"
taatagcagccctactcctccagtcactcaaggccaaaatgctgacaattgtcctggactcgtctctctcacaccatatctcactctgtcagtaaatcctgttggctctaccttcaaaatac

SEQ ID NO: 11992 - DNA, 122 bp, Homo sapiens
  misc_feature (61)..(62): /note="This region represents a CpG dinucleotide"
  misc_feature (61)..(61): /note="Nucleotide may be methylated to form 5-methylcytosine"
cccggggaggagtttatcaggctgatgtggagtgaggaatgcatgtggcatgctagcatgcgggttctgtaagcctctgtctgtgtatgcttagtaaaacacagctgaagaaagtccacaaa

SEQ ID NO: 11993 - DNA, 122 bp, Homo sapiens
  misc_feature (61)..(62): /note="This region represents a CpG dinucleotide"
  misc_feature (61)..(61): /note="Nucleotide may be methylated to form 5-methylcytosine"
aaacccaagccagatttaaacccaggttctgcagacgggaatgctaggcccctgctgtgccgtctggccagatctgtggctgagagtgggccggtttccttggggcgtctctcctggccgag

SEQ ID NO: 11994 - DNA, 122 bp, Homo sapiens
  misc_feature (61)..(62): /note="This region represents a CpG dinucleotide"
  misc_feature (61)..(61): /note="Nucleotide may be methylated to form 5-methylcytosine"
cagcactttgtccatttatgtaacaaatgtttgtttacatataggctgagccaagttacacgttaggtcccacggctaactcaatatggtccatagcagatgagccctgccagcaacttgtc

SEQ ID NO: 11995 - DNA, 122 bp, Homo sapiens
  misc_feature (61)..(62): /note="This region represents a CpG dinucleotide"
  misc_feature (61)..(61): /note="Nucleotide may be methylated to form 5-methylcytosine"
atcaatatctgtgagatgggaaacacagaagaggaaggcagagcatcagagcaaaggtttcgttcagggcttgacatggtatgatcctgggaaacctgatgaagcagtaaggttaggaagag

SEQ ID NO: 11996 - DNA, 122 bp, Homo sapiens
  misc_feature (61)..(62): /note="This region represents a CpG dinucleotide"
  misc_feature (61)..(61): /note="Nucleotide may be methylated to form 5-methylcytosine"
tgagcaaggtgccttgcccatagtcaattgttattgaaaacaagcaccccactttttcctcgtatctaaatttctttcagattccacccaggtcatccaaattctgatctgggatcaacact

SEQ ID NO: 11997 - DNA, 122 bp, Homo sapiens
  misc_feature (61)..(62): /note="This region represents a CpG dinucleotide"
  misc_feature (61)..(61): /note="Nucleotide may be methylated to form 5-methylcytosine"
aagactcagctcatttcaaacctcctcaggggagcctttcctgacttccactctcctagccgtcattgtgggtgtcatttattaggctcctcaatcacgaaggctgcttgtgatgtaacttg

SEQ ID NO: 11998 - DNA, 122 bp, Homo sapiens
  misc_feature (61)..(62): /note="This region represents a CpG dinucleotide"
  misc_feature (61)..(61): /note="Nucleotide may be methylated to form 5-methylcytosine"
cagttccttgcacatactaggtagagatacagaaaatatttcttctctagcccatactaccgaaaggttatttgtttgtttgtttttggtaatacaagcatatgtgtgtttgctcctcagta

SEQ ID NO: 11999 - DNA, 122 bp, Homo sapiens
  misc_feature (61)..(62): /note="This region represents a CpG dinucleotide"
  misc_feature (61)..(61): /note="Nucleotide may be methylated to form 5-methylcytosine"
caatcaatccttctagtcacttgatctttctatggttttaaagcaactggttttgggagtcgaccatgaactgactcagaaaatgattaccagaagtggggttcaaaaaaagctctgggcag

SEQ ID NO: 12000 - DNA, 122 bp, Homo sapiens
  misc_feature (61)..(62): /note="This region represents a CpG dinucleotide"
  misc_feature (61)..(61): /note="Nucleotide may be methylated to form 5-methylcytosine"
aagtgtcataggctttataaactgttcatttaatccttccattctccttaagtggtgggtcgtaacagctgttcgcagtcatcctcttcaactccaaatgagaaacaaaagctcagtcagtg

SEQ ID NO: 12001 - DNA, 122 bp, Homo sapiens
  misc_feature (61)..(62): /note="This region represents a CpG dinucleotide"
  misc_feature (61)..(61): /note="Nucleotide may be methylated to form 5-methylcytosine"
caacgctaggatttacatagtttggacatttctgtacttcatttattctttcctaaatgacgtaggcctcgagctatttcaagtttgcatttgtacagaactgttaaatgcctaggagtttc

SEQ ID NO: 12002 - DNA, 122 bp, Homo sapiens
  misc_feature (61)..(62): /note="This region represents a CpG dinucleotide"
  misc_feature (61)..(61): /note="Nucleotide may be methylated to form 5-methylcytosine"
acctcatgatctgcttgccttggcctcccaaagtgttgggattacaggcgtgagccaccgcgcccagccggtaggagggttttaatggtgattaaaccatctctgatccctagagagacaga

SEQ ID NO: 12003 - DNA, 122 bp, Homo sapiens
  misc_feature (61)..(62): /note="This region represents a CpG dinucleotide"
  misc_feature (61)..(61): /note="Nucleotide may be methylated to form 5-methylcytosine"
tcatagttcactttgctttattctgccctttaagaagatattcacagtctttgggaacaacgaatagagttctggtcaatttggctttagttaagaaggtgactctgttatcctctccctag

SEQ ID NO: 12004 - DNA, 122 bp, Homo sapiens
  misc_feature (61)..(62): /note="This region represents a CpG dinucleotide"
  misc_feature (61)..(61): /note="Nucleotide may be methylated to form 5-methylcytosine"
acagaataatcttctgtatccttgtaaactggattttccagtaatttgtgttcaggaagacggtatgtttatttttgtaggtatttgacttagtcttctggtttggggatctctgagagtta

SEQ ID NO: 12005 - DNA, 122 bp, Homo sapiens
  misc_feature (61)..(62): /note="This region represents a CpG dinucleotide"
  misc_feature (61)..(61): /note="Nucleotide may be methylated to form 5-methylcytosine"
ctcctggagcccctgggcaagcatttctctgggtgtggacccattactacaccaggcatacgtccagcaagctaattaatgtgcagaattaagagataatgctaaactgttttccaaagcag

SEQ ID NO: 12006 - DNA, 122 bp, Homo sapiens
  misc_feature (61)..(62): /note="This region represents a CpG dinucleotide"
  misc_feature (61)..(61): /note="Nucleotide may be methylated to form 5-methylcytosine"
cagtgttccatgcagcaaattgctctgccagtttttactcagtctttaattgcaggccctcgctttaggatctagactgctcctgagtaacatgaatggcagaacctgtgctatgctaaaaa

SEQ ID NO: 12007 - DNA, 122 bp, Homo sapiens
  misc_feature (61)..(62): /note="This region represents a CpG dinucleotide"
  misc_feature (61)..(61): /note="Nucleotide may be methylated to form 5-methylcytosine"
tgacctcatgatccgcccgcgtcagcctcctaaagtgctgggattacaggcgtgagccaccgtgcccagcccaggccttgtaattgtagcagaggatttggcttccctcagcctatggatct

SEQ ID NO: 12008 - DNA, 122 bp, Homo sapiens
  misc_feature (61)..(62): /note="This region represents a CpG dinucleotide"
  misc_feature (61)..(61): /note="Nucleotide may be methylated to form 5-methylcytosine"
cagtggaatgtcctcgggcattctgtagccttcaattttaaagagtgggataagggactgcgtcaccagataatgtgagtaaagtgcttttagatcaccagatgaaaagcattttataaaat

SEQ ID NO: 12009 - DNA, 122 bp, Homo sapiens
  misc_feature (61)..(62): /note="This region represents a CpG dinucleotide"
  misc_feature (61)..(61): /note="Nucleotide may be methylated to form 5-methylcytosine"
ctcctcaagttcctcccagaaagttatacacatcactctcacgcacattcaattggccaccgcttctagcctccagagggcaggaaactgccaccctaccatgtgccaggaagtagaagtca

SEQ ID NO: 12010 - DNA, 122 bp, Homo sapiens
  misc_feature (61)..(62): /note="This region represents a CpG dinucleotide"
  misc_feature (61)..(61): /note="Nucleotide may be methylated to form 5-methylcytosine"
ctttcaatttattttcacgtggcactcaaaatgacctgtgaaactctccagtggccagctcgttccaaaaaaagaccaatcgctcagtgaggtgcacagtctggaccatcacctctctgact

SEQ ID NO: 12011 - DNA, 122 bp, Homo sapiens
  misc_feature (61)..(62): /note="This region represents a CpG dinucleotide"
  misc_feature (61)..(61): /note="Nucleotide may be methylated to form 5-methylcytosine"
cttttagttgtcatgtctccttttgctctgcttggctgtgactctttttcagactttcctcgtatttggatgaccttgacagttctgaaaattgctgagtatgtattttgtaccagggtaca

SEQ ID NO: 12012 - DNA, 122 bp, Homo sapiens
  misc_feature (61)..(62): /note="This region represents a CpG dinucleotide"
  misc_feature (61)..(61): /note="Nucleotide may be methylated to form 5-methylcytosine"
acctgacagcagggatagtgaggaggtcagagaagagggaagtgaaatgggtgacagcaacgagccccggcctatcctcatcatctgccttgagtgaacaaacataagtgattttggcaaaa

SEQ ID NO: 12013 - DNA, 122 bp, Homo sapiens
  misc_feature (61)..(62): /note="This region represents a CpG dinucleotide"
  misc_feature (61)..(61): /note="Nucleotide may be methylated to form 5-methylcytosine"
tggggatttataaacaaggagttgggtggggccaggggatggaaaatcacaaagaagaaacgtcaaggattagctgtttctggctacccagacttaatgggattactgctgaaggcaggcca

SEQ ID NO: 12014 - DNA, 122 bp, Homo sapiens
  misc_feature (61)..(62): /note="This region represents a CpG dinucleotide"
  misc_feature (61)..(61): /note="Nucleotide may be methylated to form 5-methylcytosine"
gagacctgaatgactcaacaagcaaggactgagcacctttcgcaggctggccctgtgctgcgtgccagactgaacatgatggacgggtcccaactggatggcacttagagttggataaccat

SEQ ID NO: 12015 - DNA, 122 bp, Homo sapiens
  misc_feature (61)..(62): /note="This region represents a CpG dinucleotide"
  misc_feature (61)..(61): /note="Nucleotide may be methylated to form 5-methylcytosine"
tggggaaggtatggttccagtagagagctgcttctgccttagaaggcaatgagtcagaaacgcaaatctgagcaaaggcggaattactactacatgccagagagagtcacacatcagtcaag

SEQ ID NO: 12016 - DNA, 122 bp, Homo sapiens
  misc_feature (61)..(62): /note="This region represents a CpG dinucleotide"
  misc_feature (61)..(61): /note="Nucleotide may be methylated to form 5-methylcytosine"
tggaaattaactttgaaaaataaatcagcaaatagcaaattttctcaaaagttacagtcacgtatatagggcaagaaatgaggaagggcaagacagactccacccacattagtgagtttcat

SEQ ID NO: 12017 - DNA, 122 bp, Homo sapiens
  misc_feature (61)..(62): /note="This region represents a CpG dinucleotide"
  misc_feature (61)..(61): /note="Nucleotide may be methylated to form 5-methylcytosine"
ctaggcaaccattagccaaaggtgatgagagccgggttctgggaaggacagcaggctgtgcggggtgacctcagactggacagaaggctgtgactaactttattggcatctctctagagaca

SEQ ID NO: 12018 - DNA, 122 bp, Homo sapiens
  misc_feature (61)..(62): /note="This region represents a CpG dinucleotide"
  misc_feature (61)..(61): /note="Nucleotide may be methylated to form 5-methylcytosine"
aaactgtttggatgctttcccaggacgattggattgccctccaggcgtatctcttcaatgcggtcccggatgtaactggtgtcattagccttgcagaatgtgtcatctgtaattgaagctat

SEQ ID NO: 12019 - DNA, 122 bp, Homo sapiens
  misc_feature (61)..(62): /note="This region represents a CpG dinucleotide"
  misc_feature (61)..(61): /note="Nucleotide may be methylated to form 5-methylcytosine"
tctgctgaaggagattccagccctctgggtggttgcagctatagagttgtaaaatgccaccgttgaaagtgatctcagagatcatcagatgcaagcccataattttcaacagaagaagaaag

SEQ ID NO: 12020 - DNA, 122 bp, Homo sapiens
  misc_feature (61)..(62): /note="This region represents a CpG dinucleotide"
  misc_feature (61)..(61): /note="Nucleotide may be methylated to form 5-methylcytosine"
tactgtggctgactcaggcttgattagcctgggcctgctacaggtctttctcctgttctgcgccttactcaaaataggcagctttttggattagtcattttatcatagtatgaagagcatgc

SEQ ID NO: 12021 - DNA, 122 bp, Homo sapiens
  misc_feature (61)..(62): /note="This region represents a CpG dinucleotide"
  misc_feature (61)..(61): /note="Nucleotide may be methylated to form 5-methylcytosine"
aagagcctatttaaggacaagcactgtgaacaaacaactatacgtctttcatgccctcatcgctgagtagctttaacattgagcctaatgactcaaaatgacctaatgaggcccttttctca

SEQ ID NO: 12022 - DNA, 122 bp, Homo sapiens
  misc_feature (61)..(62): /note="This region represents a CpG dinucleotide"
  misc_feature (61)..(61): /note="Nucleotide may be methylated to form 5-methylcytosine"
gggcccttgcagagtgaacagggctggggcttgtgtcctattgttgcaggtcagggaaagcgggatggttgtagcaccgactggcttcccagcaacagcttgtccactaagctgatttcctg

SEQ ID NO: 12023 - DNA, 122 bp, Homo sapiens
  misc_feature (61)..(62): /note="This region represents a CpG dinucleotide"
  misc_feature (61)..(61): /note="Nucleotide may be methylated to form 5-methylcytosine"
cctgtcaaattcgattataaatattctttatgttatctgtcatgttgagttctccgtggacgtgttagccttgattgggctttgacggaacctgactgtactatgatttcctaccatcagtc

SEQ ID NO: 12024 - DNA, 122 bp, Homo sapiens
  misc_feature (61)..(62): /note="This region represents a CpG dinucleotide"
  misc_feature (61)..(61): /note="Nucleotide may be methylated to form 5-methylcytosine"
tgcttttaacacaactcattcatgatctgatattgtctggttctcactcagccattccttcgttcatcaaactcaaaatgtctttattaatatatactatatgtatagtttagtaatatgcg

SEQ ID NO: 12025 - DNA, 122 bp, Homo sapiens
  misc_feature (61)..(62): /note="This region represents a CpG dinucleotide"
  misc_feature (61)..(61): /note="Nucleotide may be methylated to form 5-methylcytosine"
cacatccccaccattccccaccgtggcaccatggagtcttccttacctgatctaggaaggcggcgctggagcttgctgccccctgtctgatccagcccctcatgttgtaggagggaggtggg

SEQ ID NO: 12026 - DNA, 122 bp, Homo sapiens
  misc_feature (61)..(62): /note="This region represents a CpG dinucleotide"
  misc_feature (61)..(61): /note="Nucleotide may be methylated to form 5-methylcytosine"
ctttagagagccgggcccaccttctgcttgaagtggaggcccaggcaggcagttgtagtgcgtggccccaagatgccagcctcgtgcagggccggcgatgattcgcttctcactcactccac

SEQ ID NO: 12027 - DNA, 122 bp, Homo sapiens
  misc_feature (61)..(62): /note="This region represents a CpG dinucleotide"
  misc_feature (61)..(61): /note="Nucleotide may be methylated to form 5-methylcytosine"
ccttctgcttgatataacagagttgtcatgagtctggctgtgccatggaaactggtttgacgtcactaattctgcttagatggaggattagagctagacaacacggttgatttaaagggcga

SEQ ID NO: 12028 - DNA, 122 bp, Homo sapiens
  misc_feature (61)..(62): /note="This region represents a CpG dinucleotide"
  misc_feature (61)..(61): /note="Nucleotide may be methylated to form 5-methylcytosine"
cgaccttcctcttccctatcttcccggcaggaccagtccatgggcaattggcagatcaagcgccagaatggagatgatcccttgctgacttaccggttcccaccaaagttcaccctgaaggc

SEQ ID NO: 12029 - DNA, 122 bp, Homo sapiens
  misc_feature (61)..(62): /note="This region represents a CpG dinucleotide"
  misc_feature (61)..(61): /note="Nucleotide may be methylated to form 5-methylcytosine"
ttggcattttgtacatatgaatcagaagattatttttctcattcctgaagggtgactccacgtaagcataagatattcctttgttgtggctctgttctaggtgtgacacttatccttgcagt

SEQ ID NO: 12030 - DNA, 122 bp, Homo sapiens
  misc_feature (61)..(62): /note="This region represents a CpG dinucleotide"
  misc_feature (61)..(61): /note="Nucleotide may be methylated to form 5-methylcytosine"
gatcaggtgagtctatcagaccagatttaacagataaacaagttccctctgactaacatccgtcccccatgctgagttcctggctgtgtttggttgcataatatccacaggcaacaatcgca

SEQ ID NO: 12031 - DNA, 122 bp, Homo sapiens
  misc_feature (61)..(62): /note="This region represents a CpG dinucleotide"
  misc_feature (61)..(61): /note="Nucleotide may be methylated to form 5-methylcytosine"
atgaccaatcttgattcatctcagaatggacacagagaatccttgcaatccagagttcaccgtcactgcccttactgtgtaagagcacggtctccacagccacatttcctctaggctctgtc

SEQ ID NO: 12032 - DNA, 122 bp, Homo sapiens
  misc_feature (61)..(62): /note="This region represents a CpG dinucleotide"
  misc_feature (61)..(61): /note="Nucleotide may be methylated to form 5-methylcytosine"
ttgaagggaggggacgggctctgctctgtaaactcaaatgtgtagagtcagcaacaattccgtagcttccaactgactcagaattgatgcaacgtaggtcttctggcccgaggcaggtatca

SEQ ID NO: 12033 - DNA, 122 bp, Homo sapiens
  misc_feature (61)..(62): /note="This region represents a CpG dinucleotide"
  misc_feature (61)..(61): /note="Nucleotide may be methylated to form 5-methylcytosine"
agagggaaggaattgggaacccagcaggttggtgtccttggatatgtgccccgcagaagtcgggcagcagttcctggttcgtgtggttacgctagagagaaactgacctggttcatctggtt

SEQ ID NO: 12034 - DNA, 122 bp, Homo sapiens
  misc_feature (61)..(62): /note="This region represents a CpG dinucleotide"
  misc_feature (61)..(61): /note="Nucleotide may be methylated to form 5-methylcytosine"
cagcctctgaagattcagaggaatccagggaatcaaaccggttagaggtatgcagccaggcggctccatcccatgtgtcaggttccaggttttacataccagggccctgatcattgcataac

SEQ ID NO: 12035 - DNA, 122 bp, Homo sapiens
  misc_feature (61)..(62): /note="This region represents a CpG dinucleotide"
  misc_feature (61)..(61): /note="Nucleotide may be methylated to form 5-methylcytosine"
aggggaggggtgaaagagccttttcttcctaggacctttgacaaattctggcagtgtccacggcactgtaaaacaaaacaagagaaaattcaagctcatgctgccagttcagtttatttcgg

SEQ ID NO: 12036 - DNA, 122 bp, Homo sapiens
  misc_feature (61)..(62): /note="This region represents a CpG dinucleotide"
  misc_feature (61)..(61): /note="Nucleotide may be methylated to form 5-methylcytosine"
cgggtgctccactgcgccattcccctcaatccagggatttaacttcagcgaggctgggagcgctccgaggctggcctgtccagtccaggcaaatcttgggcaattattttactctgtgtcat

SEQ ID NO: 12037 - DNA, 122 bp, Homo sapiens
  misc_feature (61)..(62): /note="This region represents a CpG dinucleotide"
  misc_feature (61)..(61): /note="Nucleotide may be methylated to form 5-methylcytosine"
tcgcaaatgtggcagttcttggtcatgaatgagcatgctaaacacacatctcagagccagcgccatgatcgatgtttgtgcctctggggtgaccctggcccacagataacagtcccatggct

SEQ ID NO: 12038 - DNA, 122 bp, Homo sapiens
  misc_feature (61)..(62): /note="This region represents a CpG dinucleotide"
  misc_feature (61)..(61): /note="Nucleotide may be methylated to form 5-methylcytosine"
agtgctttgcatacattttctcaattaatcctaactggaggcacggactattattatctccgcttttcaaaagtggaaacaccggcacagagagattaagcaacttgcccaaggtcacacag

SEQ ID NO: 12039 - DNA, 122 bp, Homo sapiens
  misc_feature (61)..(62): /note="This region represents a CpG dinucleotide"
  misc_feature (61)..(61): /note="Nucleotide may be methylated to form 5-methylcytosine"
ttagacatgagcatgtcaagcatacaactattattcttgaaacgggagagttccctgaaccgctctcaggacttgtgacaggagtgtggctcatttactcagccactgtgcactcaaatccc

SEQ ID NO: 12040 - DNA, 122 bp, Homo sapiens
  misc_feature (61)..(62): /note="This region represents a CpG dinucleotide"
  misc_feature (61)..(61): /note="Nucleotide may be methylated to form 5-methylcytosine"
caaactctaggactctgaggtgtccttgcagggattaaaactctgactaggtgtcttagtcggcttgggctgccatcacaaaataccatagtcagaatggcttcaacaacagacatttattt

SEQ ID NO: 12041 - DNA, 122 bp, Homo sapiens
  misc_feature (61)..(62): /note="This region represents a CpG dinucleotide"
  misc_feature (61)..(61): /note="Nucleotide may be methylated to form 5-methylcytosine"
gttcaagcagatgagtcaagtgtggattttcagggtgggctgaagtgaggagctgtggcacgggtcggaaagccagccaggaagccgttctgatagttcacctcattggagctggactaagt

SEQ ID NO: 12042 - DNA, 122 bp, Homo sapiens
  misc_feature (61)..(62): /note="This region represents a CpG dinucleotide"
  misc_feature (61)..(61): /note="Nucleotide may be methylated to form 5-methylcytosine"
ctggcacagagactccagccttgccggcctctcgcctcccaagcacagaagcctccagaacgctgcttcaaggacaagcccaggagacctgccatgctcatgcgtgtctttggaaacaggtt

SEQ ID NO: 12043 - DNA, 122 bp, Homo sapiens
  misc_feature (61)..(62): /note="This region represents a CpG dinucleotide"
  misc_feature (61)..(61): /note="Nucleotide may be methylated to form 5-methylcytosine"
tgtcagtatcatattcatgaagttcctgtaggaactgaaaagaccagagaaagaattgaacgggtaggaaagtagtgaatcatgtactgaatcatgtaccaaaaatgtagttttgttaaaac

SEQ ID NO: 12044 - DNA, 122 bp, Homo sapiens
  misc_feature (61)..(62): /note="This region represents a CpG dinucleotide"
  misc_feature (61)..(61): /note="Nucleotide may be methylated to form 5-methylcytosine"
aggtggggacccagccgctcctgcgaggcctgaagggctgactcctgcacagcgatgatgcggcagctgaagatcgggtattgccacactgaactcgctcaccaagatgtcgtgggattaat

SEQ ID NO: 12045 - DNA, 122 bp, Homo sapiens
  misc_feature (61)..(62): /note="This region represents a CpG dinucleotide"
  misc_feature (61)..(61): /note="Nucleotide may be methylated to form 5-methylcytosine"
ttcaatcaaattagagactgtagcatctggtgagggctgtaactgctgccatctgcacctcgtctatacaggccttttcagctgagaatcactcaacttccaaatggcaggaagagatttgg

SEQ ID NO: 12046 - DNA, 122 bp, Homo sapiens
  misc_feature (61)..(62): /note="This region represents a CpG dinucleotide"
  misc_feature (61)..(61): /note="Nucleotide may be methylated to form 5-methylcytosine"
tggagagaattagtcaattcttcctggacattcgggagcttctgggtggagggaagactgcgaagcagaaacaaacagaaatcctagagaggcagtcatctgagcattcgtcacaggggcac

SEQ ID NO: 12047 - DNA, 122 bp, Homo sapiens
  misc_feature (61)..(62): /note="This region represents a CpG dinucleotide"
  misc_feature (61)..(61): /note="Nucleotide may be methylated to form 5-methylcytosine"
aagcaggtttgctgtgcgctggtgaccaaactgagttaggaaagacagaacacacacatacgcaacacgtcatagaaagcaggtttattactcacagacaggcaatgagggacaacagaagc

SEQ ID NO: 12048 - DNA, 122 bp, Homo sapiens
  misc_feature (61)..(62): /note="This region represents a CpG dinucleotide"
  misc_feature (61)..(61): /note="Nucleotide may be methylated to form 5-methylcytosine"
tgtgcctgcatctctccctttttacgaaatggtgactcacacccataagccatcagagagcggacagacatttcaggagtttccaggtattggaaacaaatccgtgctggtccccagttttc

SEQ ID NO: 12049 - DNA, 122 bp, Homo sapiens
  misc_feature (61)..(62): /note="This region represents a CpG dinucleotide"
  misc_feature (61)..(61): /note="Nucleotide may be methylated to form 5-methylcytosine"
tgtgtgtgagtgaatttttcagagctcagctttctagagggtggagcagtgtctgtcacacgggcttctcatagctcaaactgtcatccctgctttagctcatctcttcctaattgttctct

SEQ ID NO: 12050 - DNA, 122 bp, Homo sapiens
  misc_feature (61)..(62): /note="This region represents a CpG dinucleotide"
  misc_feature (61)..(61): /note="Nucleotide may be methylated to form 5-methylcytosine"
accccctgcggcagtcccggatccgagcaacccccaatggctgtgtgtggaaggaggaagcgagaatgtggttacttaggcagggccatgtgacagcccacaccccattgtttgtgacagct

SEQ ID NO: 12051 - DNA, 122 bp, Homo sapiens
  misc_feature (61)..(62): /note="This region represents a CpG dinucleotide"
  misc_feature (61)..(61): /note="Nucleotide may be methylated to form 5-methylcytosine"
tggagttttcaactcttaaacaggccatgtaagtcatttatttgttcagccagcatttagcgagatcgttctgttttagcattgctacatattaggactacatggatgattcagatggaatt

SEQ ID NO: 12052 - DNA, 122 bp, Homo sapiens
  misc_feature (61)..(62): /note="This region represents a CpG dinucleotide"
  misc_feature (61)..(61): /note="Nucleotide may be methylated to form 5-methylcytosine"
ctgtgccagacggtgcctcagcagtgacagttatcagcagcagctaacctttactgagtgcgcacatgtggcagcgcttgtgatgagcattttgcatgcattgtttcacaacaaccctaagg

SEQ ID NO: 12053 - DNA, 122 bp, Homo sapiens
  misc_feature (61)..(62): /note="This region represents a CpG dinucleotide"
  misc_feature (61)..(61): /note="Nucleotide may be methylated to form 5-methylcytosine"
gttgccacctggcccatctgtagagtggcccaaatctggtttttgcctcctctagcaagacgggtttggtgtgctaggtgattctgacacacaccaggtccccgccttcctccagcagcctg

SEQ ID NO: 12054 - DNA, 122 bp, Homo sapiens
  misc_feature (61)..(62): /note="This region represents a CpG dinucleotide"
  misc_feature (61)..(61): /note="Nucleotide may be methylated to form 5-methylcytosine"
ggcaagataaaattcagttcccatttggcttcttcagtgaactgggtgatttccttctgacgtatgtaaaccccccagggacaggagccatcactggcttaatcacctctgtctccagggcc

SEQ ID NO: 12055 - DNA, 122 bp, Homo sapiens
  misc_feature (61)..(62): /note="This region represents a CpG dinucleotide"
  misc_feature (61)..(61): /note="Nucleotide may be methylated to form 5-methylcytosine"
agaccttgccctttgctctatgtccaaaggtgagtctaaatgtccagccacacctgtatgcggtgatgcctgtgggtttgggtgtgggagcctgcaggtacaatgcctgtgaaaggtataat

SEQ ID NO: 12056 - DNA, 122 bp, Homo sapiens
  misc_feature (61)..(62): /note="This region represents a CpG dinucleotide"
  misc_feature (61)..(61): /note="Nucleotide may be methylated to form 5-methylcytosine"
atatttataaaatacccacttggaactgatgagacaggtttcagaaatgtttgctgcatgcgctcattgtctgaatcattgtttcaggttgctccggttgctaagaagactatgaacaagtc

SEQ ID NO: 12057 - DNA, 122 bp, Homo sapiens
  misc_feature (61)..(62): /note="This region represents a CpG dinucleotide"
  misc_feature (61)..(61): /note="Nucleotide may be methylated to form 5-methylcytosine"
tgtttaatcagacacttcagctgcatatacctcccacagctcattgatgatacaacagttcgcacagggcctggcacacatgctaaaggctcagcagtattgataatcacccacacttacaa

SEQ ID NO: 12058 - DNA, 122 bp, Homo sapiens
  misc_feature (61)..(62): /note="This region represents a CpG dinucleotide"
  misc_feature (61)..(61): /note="Nucleotide may be methylated to form 5-methylcytosine"
ggatgggagtggggtggtcattatattcattctgaggttcctatttccagctgggaaaaacgcacagatccccgaggcaggttttactatgtggatcacaatactcggaccaccacctggca

SEQ ID NO: 12059 - DNA, 122 bp, Homo sapiens
  misc_feature (61)..(62): /note="This region represents a CpG dinucleotide"
  misc_feature (61)..(61): /note="Nucleotide may be methylated to form 5-methylcytosine"
gtatccattgcagtgaacacccttgtctgggctccagtggacctgggtgttctctggttgcgcaacatggtgagtcaatgcacacaggaaagcacatgttcatagggaggaagcgaattctg

SEQ ID NO: 12060 - DNA, 122 bp, Homo sapiens
  misc_feature (61)..(62): /note="This region represents a CpG dinucleotide"
  misc_feature (61)..(61): /note="Nucleotide may be methylated to form 5-methylcytosine"
ggtgcatctgatattctgatttggctttcactagatatcacatagctgagaatcatcttacgttctggtatttgacaagcattgaaagcatccgaggcaatgagttggcatggattcagcct

SEQ ID NO: 12061 - DNA, 122 bp, Homo sapiens
  misc_feature (61)..(62): /note="This region represents a CpG dinucleotide"
  misc_feature (61)..(61): /note="Nucleotide may be methylated to form 5-methylcytosine"
gcaaggctgcagaggtcagcaagacaggaggtgggagcaagagctgcattttctgggtaccggcatatgtcgggcagaatggtaaatatttgcaggagctcacagccagcctggacacgggg

SEQ ID NO: 12062 - DNA, 122 bp, Homo sapiens
  misc_feature (61)..(62): /note="This region represents a CpG dinucleotide"
  misc_feature (61)..(61): /note="Nucleotide may be methylated to form 5-methylcytosine"
gcccttcaagatcatcgaggctgcgtcgaacttccgctggtacctgcccaaggtcgtctgcgccctcacgagttttggcttctacagcagcatctactgcagcacgtggctcctggcgggca

SEQ ID NO: 12063 - DNA, 122 bp, Homo sapiens
  misc_feature (61)..(62): /note="This region represents a CpG dinucleotide"
  misc_feature (61)..(61): /note="Nucleotide may be methylated to form 5-methylcytosine"
gcagtggttacataactgcatacatttgtcaaaactcacagaaccggcaggtaggctgggcgcggtagctcatgcctgtaatcccagcactgtgggaggctgaggcgggtggatcacttgag

SEQ ID NO: 12064 - DNA, 122 bp, Homo sapiens
  misc_feature (61)..(62): /note="This region represents a CpG dinucleotide"
  misc_feature (61)..(61): /note="Nucleotide may be methylated to form 5-methylcytosine"
aattactgaggatgattaacaaacacaatgaaaactggatcaacggctccgtagtccatacgttgaaatggtactagagatggtatgttgcctatacactacagtcaacactagtattctct

SEQ ID NO: 12065 - DNA, 122 bp, Homo sapiens
  misc_feature (61)..(62): /note="This region represents a CpG dinucleotide"
  misc_feature (61)..(61): /note="Nucleotide may be methylated to form 5-methylcytosine"
ttctgcatataaaggaagttcctggctatagagtacaacacgctccatgcctttagcgaacgtgcttcagggaagagaaagcatttctagtgagaagctacatatcacgtatgctgcactgg

SEQ ID NO: 12066 - DNA, 122 bp, Homo sapiens
  misc_feature (61)..(62): /note="This region represents a CpG dinucleotide"
  misc_feature (61)..(61): /note="Nucleotide may be methylated to form 5-methylcytosine"
aacttgacttgagtgagactatacatttcatttatcttagtgtgatattcataattgttccggaaaaaaaagttgactgtgggtgctgccccagatagtgaggaatgtcacataaagcacac

SEQ ID NO: 12067 - DNA, 122 bp, Homo sapiens
  misc_feature (61)..(62): /note="This region represents a CpG dinucleotide"
  misc_feature (61)..(61): /note="Nucleotide may be methylated to form 5-methylcytosine"
tgcccaggtgataggtgtggtgtgcatgagtcctcagccctgcccaggtgacaggtgtcccgtgtgctggtcctcagctgtgcccaggcttgggctgtgggtgccgcccgttcccagtggac

SEQ ID NO: 12068 - DNA, 122 bp, Homo sapiens
  misc_feature (61)..(62): /note="This region represents a CpG dinucleotide"
  misc_feature (61)..(61): /note="Nucleotide may be methylated to form 5-methylcytosine"
ggttaacagaaagggcaacttgctgaggctgaggatttcccagctgtcagatctgagtcacgttaaggagtaagggtgcggttgtactcttgggcactggaagagatcaagtcccatccaag

SEQ ID NO: 12069 - DNA, 122 bp, Homo sapiens
  misc_feature (61)..(62): /note="This region represents a CpG dinucleotide"
  misc_feature (61)..(61): /note="Nucleotide may be methylated to form 5-methylcytosine"
aaatccacctgtgtaggtggcttcttttgggaggagtgagagcattggtaaaccctgcttcgaggattccttagggaggaaaggtaggttgcaaaacacccacatctgagttacttctgtaa

SEQ ID NO: 12070 - DNA, 122 bp, Homo sapiens
  misc_feature (61)..(62): /note="This region represents a CpG dinucleotide"
  misc_feature (61)..(61): /note="Nucleotide may be methylated to form 5-methylcytosine"
tttgtaacaagtcttttatcatcttgaagtctgaattaacatttctgtctccaccagtttcgttgtttttccatttggcaaactctaggtttttcctgttgtcttccctttgggtcatgaat

SEQ ID NO: 12071 - DNA, 122 bp, Homo sapiens
  misc_feature (61)..(62): /note="This region represents a CpG dinucleotide"
  misc_feature (61)..(61): /note="Nucleotide may be methylated to form 5-methylcytosine"
taggcaggtcactgggacagatttgaggacagctgtcaggtgattcagccattctacacacgtctgcccctagactaccaattccattagtcattagggcaatgcaaatcaaagccacaatc

SEQ ID NO: 12072 - DNA, 122 bp, Homo sapiens
  misc_feature (61)..(62): /note="This region represents a CpG dinucleotide"
  misc_feature (61)..(61): /note="Nucleotide may be methylated to form 5-methylcytosine"
cttcttacagttgttccaagcagaatccaaaacaagtccctacgttgcatttgggtgatacgtcactttagtctttccccaccctcttgcctctttttttttttttctgagacaagatctgg

SEQ ID NO: 12073 - DNA, 122 bp, Homo sapiens
  misc_feature (61)..(62): /note="This region represents a CpG dinucleotide"
  misc_feature (61)..(61): /note="Nucleotide may be methylated to form 5-methylcytosine"
ttctttagcagttgtgctatgtctaggctagtggttcccaatgtgggtccttggacctgccgcatcagcctcacctgggaatttgtcacaaatgtacatgctaaggtcttatcccaaagctg

SEQ ID NO: 12074 - DNA, 122 bp, Homo sapiens
  misc_feature (61)..(62): /note="This region represents a CpG dinucleotide"
  misc_feature (61)..(61): /note="Nucleotide may be methylated to form 5-methylcytosine"
ctctctgaaccatctgatcagtaactcctcctgttcacattacttcctgttgtgacctcacgcttcttcagactaatttaagactgtggttctccagaggcttcagctattctccacagaga

SEQ ID NO: 12075 - DNA, 122 bp, Homo sapiens
  misc_feature (61)..(62): /note="This region represents a CpG dinucleotide"
  misc_feature (61)..(61): /note="Nucleotide may be methylated to form 5-methylcytosine"
agtccctatccgaaggcagttactaagatgctctgaacgtgcgtgcacacacatgcaggacgtggctctgactcaatctgatgtggatgatgttcagttaatcctgctgaaggccactcctc

SEQ ID NO: 12076 - DNA, 122 bp, Homo sapiens
  misc_feature (61)..(62): /note="This region represents a CpG dinucleotide"
  misc_feature (61)..(61): /note="Nucleotide may be methylated to form 5-methylcytosine"
gaacctagttattcaactaaacactaatctaggtgttgctgtgaagttattatgttgatgcggttaggttagcacgtctacagttgcttgactttaaaaacaggacatgaccctcaaggatg

SEQ ID NO: 12077 - DNA, 122 bp, Homo sapiens
  misc_feature (61)..(62): /note="This region represents a CpG dinucleotide"
  misc_feature (61)..(61): /note="Nucleotide may be methylated to form 5-methylcytosine"
tctttcacccatggcctggatgattcatttgaaggaggagcaaactgttaaagtggtttgcgaaagataattgctaagaaggaaagcttcattgcaagcttagcactaatcattttggaaaa

SEQ ID NO: 12078 - DNA, 122 bp, Homo sapiens
  misc_feature (61)..(62): /note="This region represents a CpG dinucleotide"
  misc_feature (61)..(61): /note="Nucleotide may be methylated to form 5-methylcytosine"
ccccctgccacagaaccagggaaacaggaagcagggccaatccctggccccaatatcaaacgggacacctcagactcagaccagtgttgcgtttccgcttcaaggggtcccaacgcagcccc

SEQ ID NO: 12079 - DNA, 122 bp, Homo sapiens
  misc_feature (61)..(62): /note="This region represents a CpG dinucleotide"
  misc_feature (61)..(61): /note="Nucleotide may be methylated to form 5-methylcytosine"
tggaatgcagaaatgaatggagaccctgtccctgccctcccagtatgcacgagacacatacgccccgtgaagggaaagatgtgtctgtcttgcttattacagcatcccagagccatacacac

SEQ ID NO: 12080 - DNA, 122 bp, Homo sapiens
  misc_feature (61)..(62): /note="This region represents a CpG dinucleotide"
  misc_feature (61)..(61): /note="Nucleotide may be methylated to form 5-methylcytosine"
caagtggaagtcaaccagtgaatcatccctataatgtagtgaaactttagaaagaagagccgggaggatgtattggttgttaggaaaatgtaggctaccagtagaaaatgacattctctatt

SEQ ID NO: 12081 - DNA, 122 bp, Homo sapiens
  misc_feature (61)..(62): /note="This region represents a CpG dinucleotide"
  misc_feature (61)..(61): /note="Nucleotide may be methylated to form 5-methylcytosine"
tcaatggatccatgagtcacatgcttaatctcctcaaagaactctctgggcgagaacctacgcacaccttttggtctttctgagacactgggtaatagttgtttaaccacacccttgacttt

SEQ ID NO: 12082 - DNA, 122 bp, Homo sapiens
  misc_feature (61)..(62): /note="This region represents a CpG dinucleotide"
  misc_feature (61)..(61): /note="Nucleotide may be methylated to form 5-methylcytosine"
atctagacgtcagaaaagtctacaggacaatgacccaaattctgcaacaaattattaggacgagaggagagagaaggaaattaaaagacttaaaggatatgtcaatcattttcagtatgcag

SEQ ID NO: 12083 - DNA, 122 bp, Homo sapiens
  misc_feature (61)..(62): /note="This region represents a CpG dinucleotide"
  misc_feature (61)..(61): /note="Nucleotide may be methylated to form 5-methylcytosine"
ctatctggcattaacgtgcactctgtcaccataagacttaacggtggcagatggcagttgcgttagcaaacattcagttctctctctttgattcttcccttaggattgaggaaggcctggcc

SEQ ID NO: 12084 - DNA, 122 bp, Homo sapiens
  misc_feature (61)..(62): /note="This region represents a CpG dinucleotide"
  misc_feature (61)..(61): /note="Nucleotide may be methylated to form 5-methylcytosine"
gcaaacaaatctggccatgatgaattactggttgtctctccaatgcaccaggctctcttacgctccttagtatttgcatgtgctgtttcttcctggattgctaccccacccttcatctgctt

SEQ ID NO: 12085 - DNA, 122 bp, Homo sapiens
  misc_feature (61)..(62): /note="This region represents a CpG dinucleotide"
  misc_feature (61)..(61): /note="Nucleotide may be methylated to form 5-methylcytosine"
actggctggagagtggcagggctagcttggagcccaggtggtggacttcataggtgcagccgtgactgctgtcatccctcccatggggagttgttgcagagagtgagacacagcgccctaag

SEQ ID NO: 12086 - DNA, 122 bp, Homo sapiens
  misc_feature (61)..(62): /note="This region represents a CpG dinucleotide"
  misc_feature (61)..(61): /note="Nucleotide may be methylated to form 5-methylcytosine"
gtggtttctctcgtcctctaagaacactcctgttggacgagtgggaagaatgactaacatcggtcacaatctttgagcacttaatgctgtgcatgtcacactctgacctgctgacaaatgtg

SEQ ID NO: 12087 - DNA, 122 bp, Homo sapiens
  misc_feature (61)..(62): /note="This region represents a CpG dinucleotide"
  misc_feature (61)..(61): /note="Nucleotide may be methylated to form 5-methylcytosine"
aagaggaaggaacggggttcttagcctctctggccttggtgcacttgtctgctcccaggacgtttctcgatggctctccccgaggactgggagtacccagcctggtgcctccaccctgtctt

SEQ ID NO: 12088 - DNA, 122 bp, Homo sapiens
  misc_feature (61)..(62): /note="This region represents a CpG dinucleotide"
  misc_feature (61)..(61): /note="Nucleotide may be methylated to form 5-methylcytosine"
gagttcatcacaccataaaccacagggactttgtaggcatgttattgtattagcaccatacggagactactcatggaactcacatgcagagtgtgtgatgtcagagaagttgacacgaatcc

SEQ ID NO: 12089 - DNA, 122 bp, Homo sapiens
  misc_feature (61)..(62): /note="This region represents a CpG dinucleotide"
  misc_feature (61)..(61): /note="Nucleotide may be methylated to form 5-methylcytosine"
tgaactgtccctgcagtggtcatcagctgaggtacccacggaaaaatccctttgtgctcacgatttgactcagactggctgcccgtctgcctgagccagctcagccccatggatgggctctg

SEQ ID NO: 12090 - DNA, 122 bp, Homo sapiens
  misc_feature (61)..(62): /note="This region represents a CpG dinucleotide"
  misc_feature (61)..(61): /note="Nucleotide may be methylated to form 5-methylcytosine"
ccaagcagactataaagtctctaaatgcaggacctgtattttactcatctctgaatagcacggtaattacttctgagcctccttggaattcagtcagattctggcttgaatattgatcccac

SEQ ID NO: 12091 - DNA, 122 bp, Homo sapiens
  misc_feature (61)..(62): /note="This region represents a CpG dinucleotide"
  misc_feature (61)..(61): /note="Nucleotide may be methylated to form 5-methylcytosine"
ggagcaccacggcaggaaggaccgggatcttcatggcgtcaagtttggggtgctctgaggcggggcctcagtgcttgctctttatattgccaaggaggcagatgagcacagaaatggggtcc

SEQ ID NO: 12092 - DNA, 122 bp, Homo sapiens
  misc_feature (61)..(62): /note="This region represents a CpG dinucleotide"
  misc_feature (61)..(61): /note="Nucleotide may be methylated to form 5-methylcytosine"
ctccccaggaatcctgctgcctgctgagaaacatggtcagcaagtcccgtgagtgtcatccgagggctcccccaccctggaggacaggcctcagaagccgtcttcagcaggatcctgggacc

SEQ ID NO: 12093 - DNA, 122 bp, Homo sapiens
  misc_feature (61)..(62): /note="This region represents a CpG dinucleotide"
  misc_feature (61)..(61): /note="Nucleotide may be methylated to form 5-methylcytosine"
catagatggtattttggagatcatagctcaagcctgctagctctgctgcatatgcatactcgttgagtgagtctttgaggagctcaaggtacaaataggccatgttacagtgcaaggggtcc

SEQ ID NO: 12094 - DNA, 122 bp, Homo sapiens
  misc_feature (61)..(62): /note="This region represents a CpG dinucleotide"
  misc_feature (61)..(61): /note="Nucleotide may be methylated to form 5-methylcytosine"
cccaactaggatccgctccaggcttccatcatccatgcccttccctaaccaccggccacacgggaacctgaagatcagacaatggactgtcagagcagccagctcctccctgctgctcacag

SEQ ID NO: 12095 - DNA, 122 bp, Homo sapiens
  misc_feature (61)..(62): /note="This region represents a CpG dinucleotide"
  misc_feature (61)..(61): /note="Nucleotide may be methylated to form 5-methylcytosine"
cgcccgccttggcctcccaaagtgctgagattacaggagtgagccaccacacctggcctgcgcctctcatcttgatcctgcttgcagaggttgtgcagccaccggagccccgccagggtggg

SEQ ID NO: 12096 - DNA, 122 bp, Homo sapiens
  misc_feature (61)..(62): /note="This region represents a CpG dinucleotide"
  misc_feature (61)..(61): /note="Nucleotide may be methylated to form 5-methylcytosine"
attgagaccatccctagggaggtggcgacgaggagcctggctcggcttaattactgctggcggggcttggctgccatctcatcgctgccatctgttagttgcttgcttcagccagacacaag

SEQ ID NO: 12097 - DNA, 122 bp, Homo sapiens
  misc_feature (61)..(62): /note="This region represents a CpG dinucleotide"
  misc_feature (61)..(61): /note="Nucleotide may be methylated to form 5-methylcytosine"
ttagggatgacctctgccctgctgggtgcccttgatgactaacacagcaagtgtgtggaccgccacctgtcctggcctcacccaccttcaccctccatttcttcatgactgcccccgtggct

SEQ ID NO: 12098 - DNA, 122 bp, Homo sapiens
  misc_feature (61)..(62): /note="This region represents a CpG dinucleotide"
  misc_feature (61)..(61): /note="Nucleotide may be methylated to form 5-methylcytosine"
tgactttagacattgctgggagagggtgagagtccccgctctgccatgaataggatgagacgtggctgggctaggcagcatgccggactaggctctgactcaggttccacagaagggaactg

SEQ ID NO: 12099 - DNA, 122 bp, Homo sapiens
  misc_feature (61)..(62): /note="This region represents a CpG dinucleotide"
  misc_feature (61)..(61): /note="Nucleotide may be methylated to form 5-methylcytosine"
acctcctcttgtcgtttattgtatgagtgtacccctgtgccttatttacttttcctttcacggttgggtacttcccccattgcttagactttttggcccttaaacagtgctgggacaaacat

SEQ ID NO: 12100 - DNA, 122 bp, Homo sapiens
  misc_feature (61)..(62): /note="This region represents a CpG dinucleotide"
  misc_feature (61)..(61): /note="Nucleotide may be methylated to form 5-methylcytosine"
gggtaaaataaagacatctttagacatgcagaaaaatttcaaaacaatcatccatccctccgcctattcccaggcatgctgactttcctgggaggatactgatgtatgtgttcccaaaatca

SEQ ID NO: 12101 - DNA, 122 bp, Homo sapiens
  misc_feature (61)..(62): /note="This region represents a CpG dinucleotide"
  misc_feature (61)..(61): /note="Nucleotide may be methylated to form 5-methylcytosine"
gttgcagtgagaggctgctttagggccctgaaaatctgaaaggatctcccagcatagtgtcgagaagaacaggaaagtgctgtttgcagagcaacttcactaagatgatgttccagatgaat

SEQ ID NO: 12102 - DNA, 122 bp, Homo sapiens
  misc_feature (61)..(62): /note="This region represents a CpG dinucleotide"
  misc_feature (61)..(61): /note="Nucleotide may be methylated to form 5-methylcytosine"
tttggtttacaaaaaacccatacacccatttcttttttcctctctgataggattagtttccgtcagtacagcttgaatgcccagctgttgctctgggtaattccccagtccttttcttaatc

SEQ ID NO: 12103 - DNA, 122 bp, Homo sapiens
  misc_feature (61)..(62): /note="This region represents a CpG dinucleotide"
  misc_feature (61)..(61): /note="Nucleotide may be methylated to form 5-methylcytosine"
cttcccgcctgccccagtgttttgcaactgctgttaacttccgcaatgccttgctggattcgcattcagacaggcctaatctctttagcgaaggaaacaccacccctcgcttggctgtactt

SEQ ID NO: 12104 - DNA, 122 bp, Homo sapiens
  misc_feature (61)..(62): /note="This region represents a CpG dinucleotide"
  misc_feature (61)..(61): /note="Nucleotide may be methylated to form 5-methylcytosine"
ttgtaagctccagcattatgaatactatttggggctttgcctcataccctccaccccaggcgctctgccgatactttgcaaacatttattgcagttcgtgttagtttgtgaaatcaggagcc

SEQ ID NO: 12105 - DNA, 122 bp, Homo sapiens
  misc_feature (61)..(62): /note="This region represents a CpG dinucleotide"
  misc_feature (61)..(61): /note="Nucleotide may be methylated to form 5-methylcytosine"
cagaccagttctctttttctccagccttatttagctctatgggtgcaggcatgacataagcggagttgaatttactaatatggttttaccaagagagtttttcaggagagtagtggaaggga

SEQ ID NO: 12106 - DNA, 122 bp, Homo sapiens
  misc_feature (61)..(62): /note="This region represents a CpG dinucleotide"
  misc_feature (61)..(61): /note="Nucleotide may be methylated to form 5-methylcytosine"
aggtcacaagggagtggttttccacctgggccttgtcttcctactgatcatggcatggcacgccaggccagcaaccctgtgtcactgtcatctccaaggcgggggaccacaggccttgcctc

SEQ ID NO: 12107 - DNA, 122 bp, Homo sapiens
  misc_feature (61)..(62): /note="This region represents a CpG dinucleotide"
  misc_feature (61)..(61): /note="Nucleotide may be methylated to form 5-methylcytosine"
gcagcccagtgtcattgaccagtggccattctgtaaacaaggactgggcttcagcttcagcgtgctgcatgcactcccgcacccagacaccatctccaaaggcaacagccacggatttctgc

SEQ ID NO: 12108 - DNA, 122 bp, Homo sapiens
  misc_feature (61)..(62): /note="This region represents a CpG dinucleotide"
  misc_feature (61)..(61): /note="Nucleotide may be methylated to form 5-methylcytosine"
acgacctgattcaagcgcagaaggagatctccgcccataaccagcagctgcgggagcagtcggagcagctggagcaggacaaccgcgcgctccgcggccagagcttgcagctggtgggtgcc

SEQ ID NO: 12109 - DNA, 122 bp, Homo sapiens
  misc_feature (61)..(62): /note="This region represents a CpG dinucleotide"
  misc_feature (61)..(61): /note="Nucleotide may be methylated to form 5-methylcytosine"
agccacacccccaggtcacatagcacatctcaggcagagccacagtccatatctgttactcgttcctccctttttgggtggggatgattatttctatgtttattttaattatgaaagcaatg

SEQ ID NO: 12110 - DNA, 122 bp, Homo sapiens
  misc_feature (61)..(62): /note="This region represents a CpG dinucleotide"
  misc_feature (61)..(61): /note="Nucleotide may be methylated to form 5-methylcytosine"
ttgaaagggcagggtggttgccagccattcccacacctacacattttctcactctggtcccgtggtgtttaatagcttgcccagaaaaccttccctttgtcacattgatcttaattgagttg

SEQ ID NO: 12111 - DNA, 122 bp, Homo sapiens
  misc_feature (61)..(62): /note="This region represents a CpG dinucleotide"
  misc_feature (61)..(61): /note="Nucleotide may be methylated to form 5-methylcytosine"
aaggaaagatgaattccaacactattttttccctgctccgtcctgggcctatccctcctccgttagccaggcaagtgtgaatcattctgacccagaccaggtgcacaaaaccctgggagggg

SEQ ID NO: 12112 - DNA, 122 bp, Homo sapiens
  misc_feature (61)..(62): /note="This region represents a CpG dinucleotide"
  misc_feature (61)..(61): /note="Nucleotide may be methylated to form 5-methylcytosine"
ttgctcctcaaaagatggttcatgtgctgttgtgctggaccagcagcagcatcagtatcacgtgggagcttgttaaagaacctactgaatcataatttgcattttaacaggatcgccaagtg

SEQ ID NO: 12113 - DNA, 122 bp, Homo sapiens
  misc_feature (61)..(62): /note="This region represents a CpG dinucleotide"
  misc_feature (61)..(61): /note="Nucleotide may be methylated to form 5-methylcytosine"
tatgaattttagtaactcggtgtgacagccagcctccaagacggctcctagtgattcacacgcttatgtagtcccattccacagtggatggggtgacctgtgtaacccaacaggatagtgca

SEQ ID NO: 12114 - DNA, 122 bp, Homo sapiens
  misc_feature (61)..(62): /note="This region represents a CpG dinucleotide"
  misc_feature (61)..(61): /note="Nucleotide may be methylated to form 5-methylcytosine"
tcaataataagagtgtacagctcagagaagtctgggttggagatcagtgactcattcatacgcagttgacaacagaagctgtgatgtggatgagatcacctataaagacagagaaataatat

SEQ ID NO: 12115 - DNA, 122 bp, Homo sapiens
  misc_feature (61)..(62): /note="This region represents a CpG dinucleotide"
  misc_feature (61)..(61): /note="Nucleotide may be methylated to form 5-methylcytosine"
agcacccagccagggattcactttcttacctgaaactactaaaaatctgaacaaactatacgacacaacagtttcaggatttggttagttagcacaggattgtgtccctgaaagaagggagg

SEQ ID NO: 12116 - DNA, 122 bp, Homo sapiens
  misc_feature (61)..(62): /note="This region represents a CpG dinucleotide"
  misc_feature (61)..(61): /note="Nucleotide may be methylated to form 5-methylcytosine"
ttaaacctgtttgggtggaaagatgttctgtttatgcctccccttctctctaggccttatcgctgcttccctccacctgcctgcagacagacttaatccggccggagccaagggtaaagggt

SEQ ID NO: 12117 - DNA, 122 bp, Homo sapiens
  misc_feature (61)..(62): /note="This region represents a CpG dinucleotide"
  misc_feature (61)..(61): /note="Nucleotide may be methylated to form 5-methylcytosine"
caagccgggaaaagtcagcagttgcccccttgaagctggggaacagtcatgttctgacttcgctggcactgccacaaaccatccttggctaaagtcagccagtgactcataatagtgttcaa

SEQ ID NO: 12118 - DNA, 122 bp, Homo sapiens
  misc_feature (61)..(62): /note="This region represents a CpG dinucleotide"
  misc_feature (61)..(61): /note="Nucleotide may be methylated to form 5-methylcytosine"
ctgagtctgtaccccggattcctttaccaaacactggatattagacactagatgcaaagccgtatttattccaaagccagaaacttcctaagcctctgcctaactcttcacaaatgaacctg

SEQ ID NO: 12119 - DNA, 122 bp, Homo sapiens
  misc_feature (61)..(62): /note="This region represents a CpG dinucleotide"
  misc_feature (61)..(61): /note="Nucleotide may be methylated to form 5-methylcytosine"
ggtggcctagattgacttagccaactctgctttctataatagttggtgccaaaatgcagtcgtcttttgggctttacctccttggcatatgaggttctgattttattttcccagcttttgag

SEQ ID NO: 12120 - DNA, 122 bp, Homo sapiens
  misc_feature (61)..(62): /note="This region represents a CpG dinucleotide"
  misc_feature (61)..(61): /note="Nucleotide may be methylated to form 5-methylcytosine"
tctccctgctctcaagcacaccctgcaagctcaaactctgagcctttgcttatctaggctcggctgagctttatgctacttggtgaagtctgactcattctgcagggtccatttaaatgtac

SEQ ID NO: 12121 - DNA, 122 bp, Homo sapiens
  misc_feature (61)..(62): /note="This region represents a CpG dinucleotide"
  misc_feature (61)..(61): /note="Nucleotide may be methylated to form 5-methylcytosine"
cctcctgcttgcttggaatgtgaattcagactttagtcagcaggctaatgcaagggacaccgctggtgcacaggctgcagattaagggcggggagacatcccattattgggtgcacattctc

SEQ ID NO: 12122 - DNA, 122 bp, Homo sapiens
  misc_feature (61)..(62): /note="This region represents a CpG dinucleotide"
  misc_feature (61)..(61): /note="Nucleotide may be methylated to form 5-methylcytosine"
accaagtatagtcctgtgatgactgtttgatctgccagaaatgtgctttctccatagcctcgtgcttgttccatccccaccttcaggtctctgtttaaacattcccctaatggcctttccta

SEQ ID NO: 12123 - DNA, 122 bp, Homo sapiens
  misc_feature (61)..(62): /note="This region represents a CpG dinucleotide"
  misc_feature (61)..(61): /note="Nucleotide may be methylated to form 5-methylcytosine"
taatcacttcgctcataaacattcactgctctgtgggagtcctccccataggttgtcttacggatgcatcagcataagaaatgtttgatggggcctgcaatttgcttgtcattttctgccca

SEQ ID NO: 12124 - DNA, 122 bp, Homo sapiens
  misc_feature (61)..(62): /note="This region represents a CpG dinucleotide"
  misc_feature (61)..(61): /note="Nucleotide may be methylated to form 5-methylcytosine"
ctgtggtgagtcatggacagatggtggctaagcgccactgtaagggtggagagtgggtgacggcaccttggtccccaggagccctctggccacatggcacagcagtgccttcaggtccaagg

SEQ ID NO: 12125 - DNA, 122 bp, Homo sapiens
  misc_feature (61)..(62): /note="This region represents a CpG dinucleotide"
  misc_feature (61)..(61): /note="Nucleotide may be methylated to form 5-methylcytosine"
agatcagagaaaggcaatctaatgccaagtggcatgactgccagtaaccttgtgagtcagcgccacttcggatgttctattggtctcattagtagcactagaaacatataaaaaatgaccag

SEQ ID NO: 12126 - DNA, 122 bp, Homo sapiens
  misc_feature (61)..(62): /note="This region represents a CpG dinucleotide"
  misc_feature (61)..(61): /note="Nucleotide may be methylated to form 5-methylcytosine"
gatgtgtcactgtgtgagatgacaacaggatttgctggaaatgtgggccactattgtatccgccttacgtaaccacatggagtgatggaaatgggtgagcagcccggaatgtaggcggtggc

SEQ ID NO: 12127 - DNA, 122 bp, Homo sapiens
  misc_feature (61)..(62): /note="This region represents a CpG dinucleotide"
  misc_feature (61)..(61): /note="Nucleotide may be methylated to form 5-methylcytosine"
ctgtccctgccaagcagtcctgttcaggtcaatggcggtacactgcctctccctaggcaccgccttccctgaggcccttaggcagggctagggagttgcttgcacagtccttcccttagtat

SEQ ID NO: 12128 - DNA, 122 bp, Homo sapiens
  misc_feature (61)..(62): /note="This region represents a CpG dinucleotide"
  misc_feature (61)..(61): /note="Nucleotide may be methylated to form 5-methylcytosine"
accctcgagccctgcttcccaggtccgcattcccaggcagcctgccacagccagtgccagcgagagagtggatcaggcttcaggatagcccagcactgaggacatctaaaacagtcttcatt

SEQ ID NO: 12129 - DNA, 122 bp, Homo sapiens
  misc_feature (61)..(62): /note="This region represents a CpG dinucleotide"
  misc_feature (61)..(61): /note="Nucleotide may be methylated to form 5-methylcytosine"
gaccatgagtcacccaagcccagctcggccacatgccttcctgggagaaggaaccggaggcgcccaggagagtcagaagcctcttagagataaacattcggctaaggcttgccctgcccttc

SEQ ID NO: 12130 - DNA, 122 bp, Homo sapiens
  misc_feature (61)..(62): /note="This region represents a CpG dinucleotide"
  misc_feature (61)..(61): /note="Nucleotide may be methylated to form 5-methylcytosine"
attagtgcctggtaggaaatctttcattttcccagcacaaagttcattatggtgccccagcgctcactcattattagcatcccttttagctactaaacagagaagaaagtttggagtccaaa

SEQ ID NO: 12131 - DNA, 122 bp, Homo sapiens
  misc_feature (61)..(62): /note="This region represents a CpG dinucleotide"
  misc_feature (61)..(61): /note="Nucleotide may be methylated to form 5-methylcytosine"
ctcaggtgatccacccacctcggcctcccaaagtgctgggattacaggcgtgagccactgcgcctggcctactagggtgagtttctaaggcaggagctgagagtagacatggctagtagggt

SEQ ID NO: 12132 - DNA, 122 bp, Homo sapiens
  misc_feature (61)..(62): /note="This region represents a CpG dinucleotide"
  misc_feature (61)..(61): /note="Nucleotide may be methylated to form 5-methylcytosine"
ggaaggtctgattgaggctgggtccctgatgactgtggggccaacacaccagccctggaccgccagcctccaggtcttctaggtgatctaccttatggaagcctgtgatttgtgggtgttcc

SEQ ID NO: 12133 - DNA, 122 bp, Homo sapiens
  misc_feature (61)..(62): /note="This region represents a CpG dinucleotide"
  misc_feature (61)..(61): /note="Nucleotide may be methylated to form 5-methylcytosine"
ggtagcaagagtccagtgtgggccgagcggaaagcggggcattgaggtgaaaggaggagccgtgcctaccgggggaactggatatgcacagggcatgatctgaactgtcagcgaaaatgagg

SEQ ID NO: 12134 - DNA, 122 bp, Homo sapiens
  misc_feature (61)..(62): /note="This region represents a CpG dinucleotide"
  misc_feature (61)..(61): /note="Nucleotide may be methylated to form 5-methylcytosine"
caccactgaaaatacacaaggattagccagaaagccctgtggaaacataatcctaagtagcgcaggccataaggcaggaacaatttacaagagcccagagttggtcctcctgtttggtttgt

SEQ ID NO: 12135 - DNA, 122 bp, Homo sapiens
  misc_feature (61)..(62): /note="This region represents a CpG dinucleotide"
  misc_feature (61)..(61): /note="Nucleotide may be methylated to form 5-methylcytosine"
tggtggacccagctgttggctgaagaactgggtgtggtggggaggtggtgtaggaaaggacggggattgcctctcagaagcaacattcctttgttccatgagtcagagcaatgattggaaag

SEQ ID NO: 12136 - DNA, 122 bp, Homo sapiens
  misc_feature (61)..(62): /note="This region represents a CpG dinucleotide"
  misc_feature (61)..(61): /note="Nucleotide may be methylated to form 5-methylcytosine"
ctgggattcagcctccacacaacacatggtgttttctctagcaggtttctccaacgagtccggcctttctttggctcccttaactgagaccaacacacaccattcctatgaccccagttgcg

SEQ ID NO: 12137 - DNA, 122 bp, Homo sapiens
  misc_feature (61)..(62): /note="This region represents a CpG dinucleotide"
  misc_feature (61)..(61): /note="Nucleotide may be methylated to form 5-methylcytosine"
caagtctgttaagagtcctagctcagtgctggaatcaagcaagagctctgaagcagcctccgtaagctactgtaagcctccttctcttccaggacagaatccaatttcttaagcaattgtgg

SEQ ID NO: 12138 - DNA, 122 bp, Homo sapiens
  misc_feature (61)..(62): /note="This region represents a CpG dinucleotide"
  misc_feature (61)..(61): /note="Nucleotide may be methylated to form 5-methylcytosine"
aaagaaaagagagcgggtggggcaaatgatccaatctactggatttattaatatccccagcgccagcccaggaggatccttagtttctgctagtgacactagccgtgttttttcctgaggtt

SEQ ID NO: 12139 - DNA, 122 bp, Homo sapiens
  misc_feature (61)..(62): /note="This region represents a CpG dinucleotide"
  misc_feature (61)..(61): /note="Nucleotide may be methylated to form 5-methylcytosine"
cagagagaagctgtgtcacttggcagtacagtaggccaggagaagattgtggtggccccacgtggctctgtggtatttatataggatcctgcagctgctgagtctctggtgcggagcagccc

SEQ ID NO: 12140 - DNA, 122 bp, Homo sapiens
  misc_feature (61)..(62): /note="This region represents a CpG dinucleotide"
  misc_feature (61)..(61): /note="Nucleotide may be methylated to form 5-methylcytosine"
ttcaaccaaaaataccagtcacttcatgcaggaacagccttagctgatgcgagtttattccgtcattcaaaaacactgagtgcctcgtcctaggtgtccagggctgggcatgggatcagagc

SEQ ID NO: 12141 - DNA, 122 bp, Homo sapiens
  misc_feature (61)..(62): /note="This region represents a CpG dinucleotide"
  misc_feature (61)..(61): /note="Nucleotide may be methylated to form 5-methylcytosine"
ctcagatgatccgctcgcctcagcctcccaaagtgctgggattacaggcgtgagctaccacgcccggtgagtcgtttcagttttacaagaagaaaagagctctggagacagatggtgttgat

SEQ ID NO: 12142 - DNA, 122 bp, Homo sapiens
  misc_feature (61)..(62): /note="This region represents a CpG dinucleotide"
  misc_feature (61)..(61): /note="Nucleotide may be methylated to form 5-methylcytosine"
aacaatctgtgtatgtgtcattccagaactgagtgactcaactggctaagttctccctttcgcaactcatctcctgagtttcttgtaacccaggtactacccttatactgaccagttgatca

SEQ ID NO: 12143 - DNA, 122 bp, Homo sapiens
  misc_feature (61)..(62): /note="This region represents a CpG dinucleotide"
  misc_feature (61)..(61): /note="Nucleotide may be methylated to form 5-methylcytosine"
tgcaatttctggtcggcttcagttcagactcagccttgcgcgcctggaagtcattcctggcgggcttcctccaccttctttttcttggccagacgtggccagtcataaactgacagggaaaa

SEQ ID NO: 12144 - DNA, 122 bp, Homo sapiens
  misc_feature (61)..(62): /note="This region represents a CpG dinucleotide"
  misc_feature (61)..(61): /note="Nucleotide may be methylated to form 5-methylcytosine"
cagggagttaaaatccctgggtggaccagaggcagggcaaaaacagacatgaaatcctcacgcatgcaggacattcccgcctgggctctatcataaaacaagactaggcagggcatggtggc

SEQ ID NO: 12145 - DNA, 122 bp, Homo sapiens
  misc_feature (61)..(62): /note="This region represents a CpG dinucleotide"
  misc_feature (61)..(61): /note="Nucleotide may be methylated to form 5-methylcytosine"
tctaggacaccactagccatgagaattctcaggttttatcccagtcttagatcagtgtcacgtttactacctaatgtgaaagagactgggaaacattgtgtcctttgtagttaagaatgtta

SEQ ID NO: 12146 - DNA, 122 bp, Homo sapiens
  misc_feature (61)..(62): /note="This region represents a CpG dinucleotide"
  misc_feature (61)..(61): /note="Nucleotide may be methylated to form 5-methylcytosine"
tctctttctgtcagccgccctccttacataacccaaatgggttgtttgcaaagctagtgtcgctgaggtgttctgtgtacaacagaaaagaatctagggaggattcctatgtgtcactaaag

SEQ ID NO: 12147 - DNA, 122 bp, Homo sapiens
  misc_feature (61)..(62): /note="This region represents a CpG dinucleotide"
  misc_feature (61)..(61): /note="Nucleotide may be methylated to form 5-methylcytosine"
atctgtgtcataatacttcaacatggacctaattcaacatggacctcttgcacaaatgcacgcataccacctgctatctctggacgtagagccccgcagagaacatgggaaggtatatttag

SEQ ID NO: 12148 - DNA, 122 bp, Homo sapiens
  misc_feature (61)..(62): /note="This region represents a CpG dinucleotide"
  misc_feature (61)..(61): /note="Nucleotide may be methylated to form 5-methylcytosine"
actagctacagccctctaatccacacgccatgcttcagtgaaagtgttattcatttttaccgtgcttgtcacttggggcaggtgtgctcacagtggccagcccatcttgaacttgtgcttgt

SEQ ID NO: 12149 - DNA, 122 bp, Homo sapiens
  misc_feature (61)..(62): /note="This region represents a CpG dinucleotide"
  misc_feature (61)..(61): /note="Nucleotide may be methylated to form 5-methylcytosine"
aatattgtctcaggtatgggacccagcctcttctcagcctccctttcctgtaatcccagacgccacccttaccagctgagctgccacacagagaaacagctcacaattcaactcattgccca

SEQ ID NO: 12150 - DNA, 122 bp, Homo sapiens
  misc_feature (61)..(62): /note="This region represents a CpG dinucleotide"
  misc_feature (61)..(61): /note="Nucleotide may be methylated to form 5-methylcytosine"
cacaacccaattccctgtggcaaccaggtgttgctggtttaggttagtgattagtgcttacgggtggggtaaaagaaatacagccttggcttatgaatacctaggcacagaatgtccccacc

SEQ ID NO: 12151 - DNA, 122 bp, Homo sapiens
  misc_feature (61)..(62): /note="This region represents a CpG dinucleotide"
  misc_feature (61)..(61): /note="Nucleotide may be methylated to form 5-methylcytosine"
cagggtgtttgttgcttgattaaatcagtgcactcagtgcagcgcggtggagatgcaacacgccaggctcactcctgggcttgaggcccagatgttaatcatagagctgcagtcagaacgcc

SEQ ID NO: 12152 - DNA, 122 bp, Homo sapiens
  misc_feature (61)..(62): /note="This region represents a CpG dinucleotide"
  misc_feature (61)..(61): /note="Nucleotide may be methylated to form 5-methylcytosine"
gtaaagtagaggggccaggtagagatcctgctgacctggcaagcacatgttccctccagtcggggcgttgaccgctcagcagcaggtctagtgtcacccagtctttctagttctcaggagaa

SEQ ID NO: 12153 - DNA, 122 bp, Homo sapiens
  misc_feature (61)..(62): /note="This region represents a CpG dinucleotide"
  misc_feature (61)..(61): /note="Nucleotide may be methylated to form 5-methylcytosine"
ccatctcgactcgtggatggtgagtagctgaagcacggtcagctgcgtcaccaggctgtccgtggcaggctgcagcccttcgtctgaacccatctccgcggtgtggccctgccgcgggcacg

SEQ ID NO: 12154 - DNA, 122 bp, Homo sapiens
  misc_feature (61)..(62): /note="This region represents a CpG dinucleotide"
  misc_feature (61)..(61): /note="Nucleotide may be methylated to form 5-methylcytosine"
gatactgagataggcagccctaaagtggggcttgggctgtggccttccggttgtcgagtgcgcatgcatttttccttccacagaaaacatacaaccatgtttctgccaacgtagttgaccaa

SEQ ID NO: 12155 - DNA, 122 bp, Homo sapiens
  misc_feature (61)..(62): /note="This region represents a CpG dinucleotide"
  misc_feature (61)..(61): /note="Nucleotide may be methylated to form 5-methylcytosine"
cagccagattatgtatgctttagaggccattcatatgactttggcttactcagagtaagacgggaataggagagtgacctgatctggcttaaacatataacctgaatatactttttagcccc

SEQ ID NO: 12156 - DNA, 122 bp, Homo sapiens
  misc_feature (61)..(62): /note="This region represents a CpG dinucleotide"
  misc_feature (61)..(61): /note="Nucleotide may be methylated to form 5-methylcytosine"
ccaggctctggtcatgtgggtgacttcacattcctgttggttactggggacagccagctgcgggcaggcggggcccagctctgctccgtgcggaggctgtgttctgccctctccctgcccac

SEQ ID NO: 12157 - DNA, 122 bp, Homo sapiens
  misc_feature (61)..(62): /note="This region represents a CpG dinucleotide"
  misc_feature (61)..(61): /note="Nucleotide may be methylated to form 5-methylcytosine"
ggaggcctttgtccaggctgaggtgtgtctgcagactctcttctccagcaggtagctatgcgttgaccggcaatgtgattttcctcagcacatttccagccttccccgttgtgcctcttgct

SEQ ID NO: 12158 - DNA, 122 bp, Homo sapiens
  misc_feature (61)..(62): /note="This region represents a CpG dinucleotide"
  misc_feature (61)..(61): /note="Nucleotide may be methylated to form 5-methylcytosine"
ttactcaacaaagctatgatcagttaggaacagccaaactgaatgggacttgccctgggccggaaggtcagtaaaccttagcagtttgtgtttctgagaatcaagaggctcttcgtcccgga

SEQ ID NO: 12159 - DNA, 122 bp, Homo sapiens
  misc_feature (61)..(62): /note="This region represents a CpG dinucleotide"
  misc_feature (61)..(61): /note="Nucleotide may be methylated to form 5-methylcytosine"
gctcatcctgctcacctgagaattaagagccttatgtgcggtgctcttccatgatagtaacgagggacacaattattgccacacttggggcttattctgagaaggtcttccatacaacttgc

SEQ ID NO: 12160 - DNA, 122 bp, Homo sapiens
  misc_feature (61)..(62): /note="This region represents a CpG dinucleotide"
  misc_feature (61)..(61): /note="Nucleotide may be methylated to form 5-methylcytosine"
ttttgtttttcctttaacaaggtccaaagaaagatgcaaaaggagatcacacccttgccccgctgagccccgtgataacaagtcactccagactaacctgtgtgccagacatttgtgcattg

SEQ ID NO: 12161 - DNA, 122 bp, Homo sapiens
  misc_feature (61)..(62): /note="This region represents a CpG dinucleotide"
  misc_feature (61)..(61): /note="Nucleotide may be methylated to form 5-methylcytosine"
tggatttcaatgagtacatctagtatttcaattgtaacaattaactacagtcatgtgttacgtaacaatgtggatacatttcgagacatgctttgttaggtgatttcatcattatgtgaaca

SEQ ID NO: 12162 - DNA, 122 bp, Homo sapiens
  misc_feature (61)..(62): /note="This region represents a CpG dinucleotide"
  misc_feature (61)..(61): /note="Nucleotide may be methylated to form 5-methylcytosine"
ctttgttggactgccactgtgtccctggtgatctttggctgattggtctaggtcatagatcgacctgccggggtgcagaggagggtggagagtaactcagagggtcaagcatgaaagatctg

SEQ ID NO: 12163 - DNA, 122 bp, Homo sapiens
  misc_feature (61)..(62): /note="This region represents a CpG dinucleotide"
  misc_feature (61)..(61): /note="Nucleotide may be methylated to form 5-methylcytosine"
tgtaaatcctcttaggatttagctgcttaaagacaatctaaacggtacagtggccttggacgtcatcatacaggtccctgaagatagcatgccaaataggtaagcctggtatatggtagtca

SEQ ID NO: 12164 - DNA, 122 bp, Homo sapiens
  misc_feature (61)..(62): /note="This region represents a CpG dinucleotide"
  misc_feature (61)..(61): /note="Nucleotide may be methylated to form 5-methylcytosine"
caagtcattaatggttgccactacttaaatgaggctgcacaaatacgccagtttatccaacgtccctaaagtgagataatggcaacacatacaacacaggtgcacaaaaatcacaagttgtt

SEQ ID NO: 12165 - DNA, 122 bp, Homo sapiens
  misc_feature (61)..(62): /note="This region represents a CpG dinucleotide"
  misc_feature (61)..(61): /note="Nucleotide may be methylated to form 5-methylcytosine"
atgaaaggacaagaggactggaaaagaggctacaagagagcaaatgtgacaataaactttcgaagatggaaagctgtcatgcacgtgtaactgactgaagtgtgagtgtcctctactcagct

SEQ ID NO: 12166 - DNA, 122 bp, Homo sapiens
  misc_feature (61)..(62): /note="This region represents a CpG dinucleotide"
  misc_feature (61)..(61): /note="Nucleotide may be methylated to form 5-methylcytosine"
gagtcattgcagggcaacctgtctgtgacattagacaactgttagggagccgatttattacggacagagcactgtgtccaggtctggggaggccaggtcatggagaacctggagtggtccct

SEQ ID NO: 12167 - DNA, 122 bp, Homo sapiens
  misc_feature (61)..(62): /note="This region represents a CpG dinucleotide"
  misc_feature (61)..(61): /note="Nucleotide may be methylated to form 5-methylcytosine"
ggctcgcacctcccccattcccatgcccagggctgcactgttcacagactagcccagggccgcagtcaggaccagcccagcagcccagccacagaggagccagcgaacctctcccggcgcct

SEQ ID NO: 12168 - DNA, 122 bp, Homo sapiens
  misc_feature (61)..(62): /note="This region represents a CpG dinucleotide"
  misc_feature (61)..(61): /note="Nucleotide may be methylated to form 5-methylcytosine"
caggaacaatatacagatgctcccactgatcacagagagaatgtagttcttagatggagacgtcattacttgcatggcaagatcagagaagccatctgctggggccacctagaatgacacaa

SEQ ID NO: 12169 - DNA, 122 bp, Homo sapiens
  misc_feature (61)..(62): /note="This region represents a CpG dinucleotide"
  misc_feature (61)..(61): /note="Nucleotide may be methylated to form 5-methylcytosine"
aggatacattctgagaaatacacccttgggcagttttgttgttgtgcaaatatcacagagcgtacttaaacaaaccagatggtatagcctaggatatatggtagagccaaacctgtacagca

SEQ ID NO: 12170 - DNA, 122 bp, Homo sapiens
  misc_feature (61)..(62): /note="This region represents a CpG dinucleotide"
  misc_feature (61)..(61): /note="Nucleotide may be methylated to form 5-methylcytosine"
gttaactcttccccaccaaacaataactagccccatccattatcacgctaagaaaagtttcgtaagtaattacacaacaattagtcatgtcttagcctatttccctagaaagtggattcatg

SEQ ID NO: 12171 - DNA, 122 bp, Homo sapiens
  misc_feature (61)..(62): /note="This region represents a CpG dinucleotide"
  misc_feature (61)..(61): /note="Nucleotide may be methylated to form 5-methylcytosine"
agtggagctaagataaatcattagcaaccagtttctccctcaggatcaatgcagtgattacgaaagagagttgggtcatagtctatgcatgtaactggcctactttcaaacacacctttgcc

SEQ ID NO: 12172 - DNA, 122 bp, Homo sapiens
  misc_feature (61)..(62): /note="This region represents a CpG dinucleotide"
  misc_feature (61)..(61): /note="Nucleotide may be methylated to form 5-methylcytosine"
agatacacgggacttgcctagaaaagctgctttttcattgtccttccttttggggcagaacgctttcagtagtcagcaatcatgtggttgagtttgaaactgaccagccaggaggttgtggg

SEQ ID NO: 12173 - DNA, 122 bp, Homo sapiens
  misc_feature (61)..(62): /note="This region represents a CpG dinucleotide"
  misc_feature (61)..(61): /note="Nucleotide may be methylated to form 5-methylcytosine"
catgcaataacactctactttttaatccttacagcgactcagagataacaatagacattacgatcctcattctactcacaaagaaaacaaggcttggagaaggttagggattggtctaaaga

SEQ ID NO: 12174 - DNA, 122 bp, Homo sapiens
  misc_feature (61)..(62): /note="This region represents a CpG dinucleotide"
  misc_feature (61)..(61): /note="Nucleotide may be methylated to form 5-methylcytosine"
ccaacaccattaatcattcggaaagttcaaaataaaaccacaaaatgtagcactgtacaccgattggaacagcttaaattaaaaaatgctgatgacactaagtgctgtgggaatgctgagaa

SEQ ID NO: 12175 - DNA, 122 bp, Homo sapiens
  misc_feature (61)..(62): /note="This region represents a CpG dinucleotide"
  misc_feature (61)..(61): /note="Nucleotide may be methylated to form 5-methylcytosine"
cagcagcactattttagactcacttaccctcagggttgatctcattaactacccctgttacgattcaaatgaagcgggattacttccaggtgttctgttttctgcagttaggctctttctct

SEQ ID NO: 12176 - DNA, 122 bp, Homo sapiens
  misc_feature (61)..(62): /note="This region represents a CpG dinucleotide"
  misc_feature (61)..(61): /note="Nucleotide may be methylated to form 5-methylcytosine"
gttgattcattcatgagacagacacttgctgggtgcctcctagtgtcaggcgcagcgaggcgtgctggggaggcaaaggggcatagccgcctcctggcgtagtggccgggggagagacacaa

SEQ ID NO: 12177 - DNA, 122 bp, Homo sapiens
  misc_feature (61)..(62): /note="This region represents a CpG dinucleotide"
  misc_feature (61)..(61): /note="Nucleotide may be methylated to form 5-methylcytosine"
cagaggacaccaagcagcctggtcttggacagggtgttctgcagatggccattacctgagcgtgctggcctatgggctggccctgagcacccacagccacagctcccacacccaaccttaca

SEQ ID NO: 12178 - DNA, 122 bp, Homo sapiens
  misc_feature (61)..(62): /note="This region represents a CpG dinucleotide"
  misc_feature (61)..(61): /note="Nucleotide may be methylated to form 5-methylcytosine"
agactggcatatagaatgtgctcactaaaacctggactggctgattgctgaggccttcagcgggaattttacaaaagcacttgggcatgtgaattgcacaacaggtgctcaaaggctatagg

SEQ ID NO: 12179 - DNA, 122 bp, Homo sapiens
  misc_feature (61)..(62): /note="This region represents a CpG dinucleotide"
  misc_feature (61)..(61): /note="Nucleotide may be methylated to form 5-methylcytosine"
tgcatagtccatgtaagtagaagttagttatcaatgaagtgtgtgatgcttcctgccctgcgattggtagatttctatttggttcaaggattgggtaacttttcaagacctttcctgtttgt

SEQ ID NO: 12180 - DNA, 122 bp, Homo sapiens
  misc_feature (61)..(62): /note="This region represents a CpG dinucleotide"
  misc_feature (61)..(61): /note="Nucleotide may be methylated to form 5-methylcytosine"
gaatttgctcatgcaagagctatctctatctccagcttatcaaaagactcagatataaatcgctccagaaagttgggaatgttgccacctcagttgctaagctcttgtgtaatgttgttcta

SEQ ID NO: 12181 - DNA, 122 bp, Homo sapiens
  misc_feature (61)..(62): /note="This region represents a CpG dinucleotide"
  misc_feature (61)..(61): /note="Nucleotide may be methylated to form 5-methylcytosine"
ttaagtagaagctcagttagttctctacacttcaatcactccgttccagttgcctggaaacgtgagttgcttctccaacagtgaactataaagcaccgaagattcctgcatatgtccctgca

SEQ ID NO: 12182 - DNA, 122 bp, Homo sapiens
  misc_feature (61)..(62): /note="This region represents a CpG dinucleotide"
  misc_feature (61)..(61): /note="Nucleotide may be methylated to form 5-methylcytosine"
cacgtctctacctactacaaataagacaccattgtttaattcatcccttaaaagctcattcgtatggacaaaaatgggcaaagctaatctctatatatttcaactgattatgtgttacaaaa

SEQ ID NO: 12183 - DNA, 122 bp, Homo sapiens
  misc_feature (61)..(62): /note="This region represents a CpG dinucleotide"
  misc_feature (61)..(61): /note="Nucleotide may be methylated to form 5-methylcytosine"
caaatgaccaaaataatgcagagagccactaagtggcttatcaaggtcgcacatgtagtacgtggcagggcttggatttaaaccaagtagtctgactcaagagttcattttctatgctgaca

SEQ ID NO: 12184 - DNA, 122 bp, Homo sapiens
  misc_feature (61)..(62): /note="This region represents a CpG dinucleotide"
  misc_feature (61)..(61): /note="Nucleotide may be methylated to form 5-methylcytosine"
agaagtattgctgtgaactctacacatagtttatttttaatatgtatactttcctagtgccgtccactgcaaaaaccaagaaacaatggtgagccccataacagtgagcacctctagcacct

SEQ ID NO: 12185 - DNA, 122 bp, Homo sapiens
  misc_feature (61)..(62): /note="This region represents a CpG dinucleotide"
  misc_feature (61)..(61): /note="Nucleotide may be methylated to form 5-methylcytosine"
ctgaatttctggattcctgaattcattccattacaccatattgctgtgcgtgtgtgtgcacgtgtgtgcttgcgcccgcatgtatgttgaatgggagtgtgggcaggtcagctagaacatca

SEQ ID NO: 12186 - DNA, 122 bp, Homo sapiens
  misc_feature (61)..(62): /note="This region represents a CpG dinucleotide"
  misc_feature (61)..(61): /note="Nucleotide may be methylated to form 5-methylcytosine"
agaccaaatttctaaatgtaaactcttcctatctcaacatctatataacaatgtttcttacgtaataccttctacaaacatactgtaccagaataaacactggacagaacattaagaactgc

SEQ ID NO: 12187 - DNA, 122 bp, Homo sapiens
  misc_feature (61)..(62): /note="This region represents a CpG dinucleotide"
  misc_feature (61)..(61): /note="Nucleotide may be methylated to form 5-methylcytosine"
tcccaagtcacccactacacaaatggagcagtggagcctgcagctggtgcagagcgtggacgaagcaggttatggctgagcaagaacagccactcaggcactaccttggggtggggcacaca

SEQ ID NO: 12188 - DNA, 122 bp, Homo sapiens
  misc_feature (61)..(62): /note="This region represents a CpG dinucleotide"
  misc_feature (61)..(61): /note="Nucleotide may be methylated to form 5-methylcytosine"
ctgatgaacttagccccaggcagttggaattaataaagttttcagtagatgtccatgttccgtttgaattctagctcctgttaactccccagttaatcctcatgtaatgtctacccaaaaat

SEQ ID NO: 12189 - DNA, 122 bp, Homo sapiens
  misc_feature (61)..(62): /note="This region represents a CpG dinucleotide"
  misc_feature (61)..(61): /note="Nucleotide may be methylated to form 5-methylcytosine"
gctgtttatgtgcaaatctacacgtccctttctctactggggaagaacagagataaggagcggacgtgctcaaagggtgagtcaatgggatcttaggccaggagcctattgttttcccattt

SEQ ID NO: 12190 - DNA, 122 bp, Homo sapiens
  misc_feature (61)..(62): /note="This region represents a CpG dinucleotide"
  misc_feature (61)..(61): /note="Nucleotide may be methylated to form 5-methylcytosine"
tgtgcgcgagtcttttaacctttctgagcctcagttttctcctctgtaaagtcatctggccgtatggtttcttcaaggattaaatgagatgctcaatatattataaatgtgtaatagaagaa

SEQ ID NO: 12191 - DNA, 122 bp, Homo sapiens
  misc_feature (61)..(62): /note="This region represents a CpG dinucleotide"
  misc_feature (61)..(61): /note="Nucleotide may be methylated to form 5-methylcytosine"
gaaggacctgaggcttgaaaccagaggtgtcttttagccatgagggaaagttcagagatgcggacacagcaactcagcctcatgtggctgctaaatcaacccccaaactgcccttcctgact

SEQ ID NO: 12192 - DNA, 122 bp, Homo sapiens
  misc_feature (61)..(62): /note="This region represents a CpG dinucleotide"
  misc_feature (61)..(61): /note="Nucleotide may be methylated to form 5-methylcytosine"
gcacggtagtaggctctgggaattcgataaaccccaaatctgccctcttggagctgacagcgtggcaggaaagatagacactaagtgtaaagatgagtaatggcacgcgttgccagtgtatc

SEQ ID NO: 12193 - DNA, 122 bp, Homo sapiens
  misc_feature (61)..(62): /note="This region represents a CpG dinucleotide"
  misc_feature (61)..(61): /note="Nucleotide may be methylated to form 5-methylcytosine"
atgagcaagtccagctgagattagaagagctgcccagcttagcccagatcagcggacctccgggtaaccctgggacacatgagcaaagccagctgaggtcagcacacttactcatccctacc

SEQ ID NO: 12194 - DNA, 122 bp, Homo sapiens
  misc_feature (61)..(62): /note="This region represents a CpG dinucleotide"
  misc_feature (61)..(61): /note="Nucleotide may be methylated to form 5-methylcytosine"
attgctgttctggccttcagctgatcacagctagaaactgtcggtaacattagcactaagcgctaataaccattaaaacagatgaccatttaccaagcccctactctaagccaggcgtggtt

SEQ ID NO: 12195 - DNA, 122 bp, Homo sapiens
  misc_feature (61)..(62): /note="This region represents a CpG dinucleotide"
  misc_feature (61)..(61): /note="Nucleotide may be methylated to form 5-methylcytosine"
gagtcaaaatgaaataggcaggtaaggctgaaagaatgctctagtcacaggaagagcctacgcaattcgtggaggtgagtcatggttagagaaggatcctagttccacatggttgtagaaca

SEQ ID NO: 12196 - DNA, 122 bp, Homo sapiens
  misc_feature (61)..(62): /note="This region represents a CpG dinucleotide"
  misc_feature (61)..(61): /note="Nucleotide may be methylated to form 5-methylcytosine"
ccctctgtggatcagtttgttcactataaaataggtgctaatgataatatctacttgatacggcagatgtgtggattaagtggtatcatacacgtatagctcttaaaatagtgcctggtact

SEQ ID NO: 12197 - DNA, 122 bp, Homo sapiens
  misc_feature (61)..(62): /note="This region represents a CpG dinucleotide"
  misc_feature (61)..(61): /note="Nucleotide may be methylated to form 5-methylcytosine"
taaggcaatgggagggccagagagggtgcctctcactcccatagtctctgagcgtgataacggtagcgccagaccagcacacaggcttcatgattttcagcagcatgttcttcccatccatg

SEQ ID NO: 12198 - DNA, 122 bp, Homo sapiens
  misc_feature (61)..(62): /note="This region represents a CpG dinucleotide"
  misc_feature (61)..(61): /note="Nucleotide may be methylated to form 5-methylcytosine"
tctgatttgggttgtgatatctacacagaccgtgtaaacacagaccgtgtaaacacagaccgtgagatttgctttctttgtttggagaaaagatttcctgagttccttgtcccaggctaatt

SEQ ID NO: 12199 - DNA, 122 bp, Homo sapiens
  misc_feature (61)..(62): /note="This region represents a CpG dinucleotide"
  misc_feature (61)..(61): /note="Nucleotide may be methylated to form 5-methylcytosine"
tgcacacaataggctgcaaaggagggagctctggaggaagaatacacgcttaggccagggcggcctcatggccagatagcccaggctctgtttcacccacattgaggaactgtgaaatcctg

SEQ ID NO: 12200 - DNA, 122 bp, Homo sapiens
  misc_feature (61)..(62): /note="This region represents a CpG dinucleotide"
  misc_feature (61)..(61): /note="Nucleotide may be methylated to form 5-methylcytosine"
ggaggcttgacaagtaatccccaaggcctcagtctcctctcttctccaatagggagtgtgcgtgcatgtctccaggagaggtagtgctttccacacagcttctcgtctgtgctgtctcaaaa

SEQ ID NO: 12201 - DNA, 122 bp, Homo sapiens
  misc_feature (61)..(62): /note="This region represents a CpG dinucleotide"
  misc_feature (61)..(61): /note="Nucleotide may be methylated to form 5-methylcytosine"
aactggatgaggtagctgctatttgtagttcagttttataagatgagcaaagagaggctacgagaggtaagttacaaccagctaggtagtgatggagcctggagtttgtgggtaccaaagtg

SEQ ID NO: 12202 - DNA, 122 bp, Homo sapiens
  misc_feature (61)..(62): /note="This region represents a CpG dinucleotide"
  misc_feature (61)..(61): /note="Nucleotide may be methylated to form 5-methylcytosine"
ctctatgccagtgccttgctctaacatttacacatgaatagagacacgatgggtgaaaagcgcgagctctgagtctgcaataccttgcagattttactgtgactcagctacagaatgggtgg

SEQ ID NO: 12203 - DNA, 122 bp, Homo sapiens
  misc_feature (61)..(62): /note="This region represents a CpG dinucleotide"
  misc_feature (61)..(61): /note="Nucleotide may be methylated to form 5-methylcytosine"
ggtcagataagaagtggcagttcagtaacaaggactgtaacacagcccagggtgtggcaccgtgctttgagatcctctggatgacctcacaggaaaggcggagaaaccaagccttgcatata

SEQ ID NO: 12204 - DNA, 122 bp, Homo sapiens
  misc_feature (61)..(62): /note="This region represents a CpG dinucleotide"
  misc_feature (61)..(61): /note="Nucleotide may be methylated to form 5-methylcytosine"
tgggattagaggtgtgagccaccacacccagcccaggtgggacacatttattcttcaacacgcctgctgggggcagtacagcatggtgatttagaacaagagttcatccacaactacagccc

SEQ ID NO: 12205 - DNA, 122 bp, Homo sapiens
  misc_feature (61)..(62): /note="This region represents a CpG dinucleotide"
  misc_feature (61)..(61): /note="Nucleotide may be methylated to form 5-methylcytosine"
tggctgaacattctacacaatgcagaagatacaagtctttttttctaataatctatgtttcgtaagcataatacaattcaaccataaaagatacctcaatcaacactacagccagacttact

SEQ ID NO: 12206 - DNA, 122 bp, Homo sapiens
  misc_feature (61)..(62): /note="This region represents a CpG dinucleotide"
  misc_feature (61)..(61): /note="Nucleotide may be methylated to form 5-methylcytosine"
gaatctggacaatatcttgactctgactaattccagcttaacaagaagggtgttgtctctcgaatgaatgtaacaggaaagcagaaaagcataaagacaggggtgagcaggaaacttgccct

SEQ ID NO: 12207 - DNA, 122 bp, Homo sapiens
  misc_feature (61)..(62): /note="This region represents a CpG dinucleotide"
  misc_feature (61)..(61): /note="Nucleotide may be methylated to form 5-methylcytosine"
gtggaaactcagggagaaaaacaacagtgagaaagactagcgaaatagcaaggaaccagacggcttgcctgagagagtctgtgcctccgggcaatttattaatagaagactgagatgcacct

SEQ ID NO: 12208 - DNA, 122 bp, Homo sapiens
  misc_feature (61)..(62): /note="This region represents a CpG dinucleotide"
  misc_feature (61)..(61): /note="Nucleotide may be methylated to form 5-methylcytosine"
ttcacgtgtcctagaatcttagaattctgagttggaataagcctatcaaaatgcagaccacgcatcggacggttgggcgggtcggggaggggaggtccacaggcctgggctcaaatcctgac

SEQ ID NO: 12209 - DNA, 122 bp, Homo sapiens
  misc_feature (61)..(62): /note="This region represents a CpG dinucleotide"
  misc_feature (61)..(61): /note="Nucleotide may be methylated to form 5-methylcytosine"
gttctagaatacccattgattgaaagagctgtggccaaacaggaaggacagagtaagagccgctgacaaaggattctgccaagacagaatcccagggtcacaggagagaggcttggggcagt

SEQ ID NO: 12210 - DNA, 122 bp, Homo sapiens
  misc_feature (61)..(62): /note="This region represents a CpG dinucleotide"
  misc_feature (61)..(61): /note="Nucleotide may be methylated to form 5-methylcytosine"
aagtgactgtgaagctggtcagccctgaggctcatgcttagcctggttctgatggcctctcgtaggctgccacatcctgctcgctacacaaaggcatttgaccagaaagcctgctctgcctg

SEQ ID NO: 12211 - DNA, 122 bp, Homo sapiens
  misc_feature (61)..(62): /note="This region represents a CpG dinucleotide"
  misc_feature (61)..(61): /note="Nucleotide may be methylated to form 5-methylcytosine"
ctgaatgtccctgtgcccactggggactttgggaacagaaacatgccaagatgctacaaccggccctgggcacaaagccacctctccagctttccatgcccagcattagtcctggcatggag

SEQ ID NO: 12212 - DNA, 122 bp, Homo sapiens
  misc_feature (61)..(62): /note="This region represents a CpG dinucleotide"
  misc_feature (61)..(61): /note="Nucleotide may be methylated to form 5-methylcytosine"
gggtcatttgcatgagaacagattcctttgtgtaaagttggcctgcctgttctctgtccacgtttatagtccttcaagtcttcgtgttgggttgctaggcagatatgaccctggcttgcaaa

SEQ ID NO: 12213 - DNA, 122 bp, Homo sapiens
  misc_feature (61)..(62): /note="This region represents a CpG dinucleotide"
  misc_feature (61)..(61): /note="Nucleotide may be methylated to form 5-methylcytosine"
caaggacctgaagaagcattactggttcattatggttaggacctgtcagaacagagctgacggctgtcaaggcctccagggcaaagaaaagagcacatatcatacatgttatttttccatgt

SEQ ID NO: 12214 - DNA, 122 bp, Homo sapiens
  misc_feature (61)..(62): /note="This region represents a CpG dinucleotide"
  misc_feature (61)..(61): /note="Nucleotide may be methylated to form 5-methylcytosine"
acctgcaagttaggtcgtttccaattctgctttcttcaacattgagttgttggccaggtgcggtggctcatgcctgtaatcccagcactttgggaggccgaggtgggcggatcacttgaggt

SEQ ID NO: 12215 - DNA, 122 bp, Homo sapiens
  misc_feature (61)..(62): /note="This region represents a CpG dinucleotide"
  misc_feature (61)..(61): /note="Nucleotide may be methylated to form 5-methylcytosine"
tgtcctgtgccaagagagactagagtggcaacatggcaattcctgaggtgctgcttctgtcgtacaccctcattccagcttggacagggcctcttaattgttttatatatggggcatctgtt

SEQ ID NO: 12216 - DNA, 122 bp, Homo sapiens
  misc_feature (61)..(62): /note="This region represents a CpG dinucleotide"
  misc_feature (61)..(61): /note="Nucleotide may be methylated to form 5-methylcytosine"
gataaatgctttatttggtcaaaaactggaagctgacgctccacttaagagtctaggtcacgcggcaagccagacacttgaaggagcttaaagctttctgttcttaatagtattttagacac

SEQ ID NO: 12217 - DNA, 122 bp, Homo sapiens
  misc_feature (61)..(62): /note="This region represents a CpG dinucleotide"
  misc_feature (61)..(61): /note="Nucleotide may be methylated to form 5-methylcytosine"
acacagtaaggtagccaaggctcaccttatacttcctcatgcagttgatgacagtaattccgtagccattactgagcatgtacatttgtcaggtactggtttgtactttaaaagaattacca

SEQ ID NO: 12218 - DNA, 122 bp, Homo sapiens
  misc_feature (61)..(62): /note="This region represents a CpG dinucleotide"
  misc_feature (61)..(61): /note="Nucleotide may be methylated to form 5-methylcytosine"
ctcacctctggcaggctgtcaggaaatgagaggttacggcacctgcaaagaacagccaagcgcttagatttgtgactcagctggagtcatctcaggagctgacccagcccatgtcctggctc

SEQ ID NO: 12219 - DNA, 122 bp, Homo sapiens
  misc_feature (61)..(62): /note="This region represents a CpG dinucleotide"
  misc_feature (61)..(61): /note="Nucleotide may be methylated to form 5-methylcytosine"
ttgccagcagacctccaataaaggaattctaagttcagagagaaggaaattattttcaaacggaaggtctgagaagctagaaggaatgaagaacaaaaagtgttaaatatgtatgtacatgt

SEQ ID NO: 12220 - DNA, 122 bp, Homo sapiens
  misc_feature (61)..(62): /note="This region represents a CpG dinucleotide"
  misc_feature (61)..(61): /note="Nucleotide may be methylated to form 5-methylcytosine"
atccgcctcagcctcccaaagtgctgggattacaggtgtacaccctgcccagccacaagccgatttttaaaaggtcaaatgctatgacagccattttacaggaaaaaaaaaaattgtatagt

SEQ ID NO: 12221 - DNA, 122 bp, Homo sapiens
  misc_feature (61)..(62): /note="This region represents a CpG dinucleotide"
  misc_feature (61)..(61): /note="Nucleotide may be methylated to form 5-methylcytosine"
ttcacctagaaactcccaatgaaaacatgtttggtatctgtggagccttgttttcccttgcggtctatcagtcttagactaatggtgctctggatatgatgaaagattcttacctacttaca

SEQ ID NO: 12222 - DNA, 122 bp, Homo sapiens
  misc_feature (61)..(62): /note="This region represents a CpG dinucleotide"
  misc_feature (61)..(61): /note="Nucleotide may be methylated to form 5-methylcytosine"
tgatgctaatttttcatttcctgggcctgccattccatccaaatcacattttgctcagcacgcttcttaacaaaacagatccagttgattggtgacttttaagtgaggaagctttctgattt

SEQ ID NO: 12223 - DNA, 122 bp, Homo sapiens
  misc_feature (61)..(62): /note="This region represents a CpG dinucleotide"
  misc_feature (61)..(61): /note="Nucleotide may be methylated to form 5-methylcytosine"
tcatgcagctccagaatgaagccataatccaattttagaaaacgtatcatctgggccgggcgcagtggctcacacctgtaatcccagcactttgggaggcccaggtggcagatcacttgagg

SEQ ID NO: 12224 - DNA, 122 bp, Homo sapiens
  misc_feature (61)..(62): /note="This region represents a CpG dinucleotide"
  misc_feature (61)..(61): /note="Nucleotide may be methylated to form 5-methylcytosine"
aaggcaataggaagtgtgtcatcagaaggcacttggctgtttggatgactctctttgtgacgttagcagccattgatactcactacttagatggattaattcattggaggttgcaaaatagt

SEQ ID NO: 12225 - DNA, 122 bp, Homo sapiens
  misc_feature (61)..(62): /note="This region represents a CpG dinucleotide"
  misc_feature (61)..(61): /note="Nucleotide may be methylated to form 5-methylcytosine"
agggcagggctccagagctaggctgctaagttcagatcttccattctttagctgtgagaccgtgggcaagttaatgaacctctctgggtttcagtagcctcgtctagaaaacaggaatcata

SEQ ID NO: 12226 - DNA, 122 bp, Homo sapiens
  misc_feature (61)..(62): /note="This region represents a CpG dinucleotide"
  misc_feature (61)..(61): /note="Nucleotide may be methylated to form 5-methylcytosine"
cccactcttgacacgtggggattattacaatccaagatgagatttgggtggggacacagccgaagtatatcaccaggctctgctaagcactgaaggccatagtgcttgttcatagcttcctt

SEQ ID NO: 12227 - DNA, 122 bp, Homo sapiens
  misc_feature (61)..(62): /note="This region represents a CpG dinucleotide"
  misc_feature (61)..(61): /note="Nucleotide may be methylated to form 5-methylcytosine"
actggattcttttctaaacattttgaagtttttattccctgtcatcaggtcattccaaaacgataaagcactaacttaagctagctggaattagagattagggggaacagtacacaaaagag

SEQ ID NO: 12228 - DNA, 122 bp, Homo sapiens
  misc_feature (61)..(62): /note="This region represents a CpG dinucleotide"
  misc_feature (61)..(61): /note="Nucleotide may be methylated to form 5-methylcytosine"
ggtctcactctgtctcagagtctagcgagtatagagtgtatggcctgcctgctgggccaccgcagccttctggtcttctggcctttgcctggactgactgccctgactgccagctgtgtctc

SEQ ID NO: 12229 - DNA, 122 bp, Homo sapiens
  misc_feature (61)..(62): /note="This region represents a CpG dinucleotide"
  misc_feature (61)..(61): /note="Nucleotide may be methylated to form 5-methylcytosine"
ctaatttaacataagaagtagacatggacagattaactatgggcacatgacaacacatcacggtaccaggtttctaagaaaaatgtttgcccaggggactagcttaaaacagagagtagtaa

SEQ ID NO: 12230 - DNA, 122 bp, Homo sapiens
  misc_feature (61)..(62): /note="This region represents a CpG dinucleotide"
  misc_feature (61)..(61): /note="Nucleotide may be methylated to form 5-methylcytosine"
agaacttgctttgacagagctgttccagctcatttgtaataacatgcttagaaccttctgcgttcaagagcatgtcagaagggaatgcctggtcgttgtctccctgggaagcagcgtggagc

SEQ ID NO: 12231 - DNA, 122 bp, Homo sapiens
  misc_feature (61)..(62): /note="This region represents a CpG dinucleotide"
  misc_feature (61)..(61): /note="Nucleotide may be methylated to form 5-methylcytosine"
caatccaaaaacctgcaggccagcaccctggaaaccaaacctcacattttccaggaaggccgtgaagatgcctgtgggccttctgctgttacatttatcaaaaactgtaaaattaagaacat

SEQ ID NO: 12232 - DNA, 122 bp, Homo sapiens
  misc_feature (61)..(62): /note="This region represents a CpG dinucleotide"
  misc_feature (61)..(61): /note="Nucleotide may be methylated to form 5-methylcytosine"
ctggacagcttccgggaaaacttcccaaagcaaagctttcaccagaattgcacatgaccacgatcacactggccacagggaactgctgagaatgtctctctccacctggttttcttgacctc

SEQ ID NO: 12233 - DNA, 122 bp, Homo sapiens
  misc_feature (61)..(62): /note="This region represents a CpG dinucleotide"
  misc_feature (61)..(61): /note="Nucleotide may be methylated to form 5-methylcytosine"
gtaggatagacgtctgaagctcaggggacaggccaagactgcagatataaatttaagagtcgactgcatgtagatgatatttaaagccaagggactgaatgagatcaagggactgaaatcac

SEQ ID NO: 12234 - DNA, 122 bp, Homo sapiens
  misc_feature (61)..(62): /note="This region represents a CpG dinucleotide"
  misc_feature (61)..(61): /note="Nucleotide may be methylated to form 5-methylcytosine"
tgaggccagtttcctgaaccaagattcagagctagccagtgaacctagcagatgggccagcgttcaatttccactgaagtctggcgttctcaattcctgtaaccgcccaaggggttcacctt

SEQ ID NO: 12235 - DNA, 122 bp, Homo sapiens
  misc_feature (61)..(62): /note="This region represents a CpG dinucleotide"
  misc_feature (61)..(61): /note="Nucleotide may be methylated to form 5-methylcytosine"
tgcaagatccatgaaggcagggattcttttctgctttgtcatcatgtgactcaaattcctcgaacagtgcctggcacatactagcagttctttttcttttttttttgtttttgagacagagt

SEQ ID NO: 12236 - DNA, 122 bp, Homo sapiens
  misc_feature (61)..(62): /note="This region represents a CpG dinucleotide"
  misc_feature (61)..(61): /note="Nucleotide may be methylated to form 5-methylcytosine"
ctttgctcatacatccactatagcccaggctgtcctgagtgacagctctccaggttggtgcgtcctatctgctccaccccctcacgccctcagccccacaggactgggaactccttcaggct

SEQ ID NO: 12237 - DNA, 122 bp, Homo sapiens
  misc_feature (61)..(62): /note="This region represents a CpG dinucleotide"
  misc_feature (61)..(61): /note="Nucleotide may be methylated to form 5-methylcytosine"
actcagggcacaaacatttggcctctaacccaggcaactaagaggggaaggagctttctacgtcactgttctgtggaactagaaggcctttgccttaaaaagtctgttcttatctgtcagta

SEQ ID NO: 12238 - DNA, 122 bp, Homo sapiens
  misc_feature (61)..(62): /note="This region represents a CpG dinucleotide"
  misc_feature (61)..(61): /note="Nucleotide may be methylated to form 5-methylcytosine"
tccagacttgaagaaatttccattctgttaaatttctagccaactcatcacaatcaactacgcaagcaaacaataccccataagaacaacaataagtaatcacatattgctggctccaggaa

SEQ ID NO: 12239 - DNA, 122 bp, Homo sapiens
  misc_feature (61)..(62): /note="This region represents a CpG dinucleotide"
  misc_feature (61)..(61): /note="Nucleotide may be methylated to form 5-methylcytosine"
gaccttgttgtgttaccaatgtgtcactgaatcctaattcaatgcttcaagcgtggtaaacgttaatgaatgaataaggtttttgaaaagcaggaacattgtgttgaccttactcatagtat

SEQ ID NO: 12240 - DNA, 122 bp, Homo sapiens
  misc_feature (61)..(62): /note="This region represents a CpG dinucleotide"
  misc_feature (61)..(61): /note="Nucleotide may be methylated to form 5-methylcytosine"
gtgtttcgtaattaaccagagacagacatgaaaatccctaagcaaatcttcggcctcagtcgagcattcactggacttaatccacttgactcaatagtaatcatttatgaataaataagcca

SEQ ID NO: 12241 - DNA, 122 bp, Homo sapiens
  misc_feature (61)..(62): /note="This region represents a CpG dinucleotide"
  misc_feature (61)..(61): /note="Nucleotide may be methylated to form 5-methylcytosine"
gggaggtccaagaggagctcccaagctctgctcctcaaggggtaccctggatccagcctgcggctcacgcttgcttcagtgcagctgtgtatccttctgacatgagcctggggcggttacgt

SEQ ID NO: 12242 - DNA, 122 bp, Homo sapiens
  misc_feature (61)..(62): /note="This region represents a CpG dinucleotide"
  misc_feature (61)..(61): /note="Nucleotide may be methylated to form 5-methylcytosine"
ttagagaattaaatcatccttgccagtgcctgtgagacaatgttccaatacaaaaagacacgctgtcatccttttgtcttatttccaagctgcggatatttcctaacatcttgagtcatcct

SEQ ID NO: 12243 - DNA, 122 bp, Homo sapiens
  misc_feature (61)..(62): /note="This region represents a CpG dinucleotide"
  misc_feature (61)..(61): /note="Nucleotide may be methylated to form 5-methylcytosine"
ggctagggaccttgccagagctggttctgtgtcgcgcgtcagaagcgctagaggtcgttgcgtggcgtgggtggctcggggagtgggtggctgagcggagctggggtccctggccagaggcg

SEQ ID NO: 12244 - DNA, 122 bp, Homo sapiens
  misc_feature (61)..(62): /note="This region represents a CpG dinucleotide"
  misc_feature (61)..(61): /note="Nucleotide may be methylated to form 5-methylcytosine"
ctcctccgaggaaactaggatattgctgccttgcttaaaatctggctaagccctactccacgtgacatgcaaggccctttgtgacctggtcccttaggtcaagcctcccctcccactcctgc

SEQ ID NO: 12245 - DNA, 122 bp, Homo sapiens
  misc_feature (61)..(62): /note="This region represents a CpG dinucleotide"
  misc_feature (61)..(61): /note="Nucleotide may be methylated to form 5-methylcytosine"
tgtgtgcatcagtgagtcatgtttcagtcatctaatgccgtgtaataaactaccccaagacgtaatggcatttaaaccctcaatgatcattttagtgtctcttagggttcggggggttacct

SEQ ID NO: 12246 - DNA, 122 bp, Homo sapiens
  misc_feature (61)..(62): /note="This region represents a CpG dinucleotide"
  misc_feature (61)..(61): /note="Nucleotide may be methylated to form 5-methylcytosine"
agaagcaggaggattcgtcatgcaccctgaggcttgccagtattgatgtcagacttcctccgaccgtgttgccaccctggactgtttgactttggtagctattttaaaacagcaagaagagc

SEQ ID NO: 12247 - DNA, 122 bp, Homo sapiens
  misc_feature (61)..(62): /note="This region represents a CpG dinucleotide"
  misc_feature (61)..(61): /note="Nucleotide may be methylated to form 5-methylcytosine"
ccagggtttccagcaggagctgaacccttaactggctggaggaccagctgctttactggtcggctgggctggacaatgcgctgaacagcagcctggttcccagggaccttggcggccaacac

SEQ ID NO: 12248 - DNA, 122 bp, Homo sapiens
  misc_feature (61)..(62): /note="This region represents a CpG dinucleotide"
  misc_feature (61)..(61): /note="Nucleotide may be methylated to form 5-methylcytosine"
caagttttaggtggatgaactcttagaacagtgccagaataaaaggctacctgtatttcacgaagattcgtgacaaaaagttaagagcattgtgcaatatgctggtaatgatcaaatgggca

SEQ ID NO: 12249 - DNA, 122 bp, Homo sapiens
  misc_feature (61)..(62): /note="This region represents a CpG dinucleotide"
  misc_feature (61)..(61): /note="Nucleotide may be methylated to form 5-methylcytosine"
cactttgagttaggaaagtggcccattcatcatttcaatggggctttctgaaccccagcacgacgccatggatttagggctctggctgctacagctttagatccagcctcctcttcctaagt

SEQ ID NO: 12250 - DNA, 122 bp, Homo sapiens
  misc_feature (61)..(62): /note="This region represents a CpG dinucleotide"
  misc_feature (61)..(61): /note="Nucleotide may be methylated to form 5-methylcytosine"
ttaaatgtattgtgttgattctgacaattctatgaagtaggaaatgtggagacatttatccgaagagagaaagtgaactacctaacaaaacagttaggaagtggtgggatcccaggtcggct

SEQ ID NO: 12251 - DNA, 122 bp, Homo sapiens
  misc_feature (61)..(62): /note="This region represents a CpG dinucleotide"
  misc_feature (61)..(61): /note="Nucleotide may be methylated to form 5-methylcytosine"
aaacttaaaggagaaaaggattacgaagcttaatgattgctgtttaatgccaagcctaagcggcacgttgcactgtgctgtgctcagaatataacattcaagtaattgagaaaagtggtatc

SEQ ID NO: 12252 - DNA, 122 bp, Homo sapiens
  misc_feature (61)..(62): /note="This region represents a CpG dinucleotide"
  misc_feature (61)..(61): /note="Nucleotide may be methylated to form 5-methylcytosine"
ctgggaccgagggagggggcaggcctggactctgctgaacacctaatgagcatcagggagcgccactgcaggacgagcagcagagccaagattagagcccctgctgtcctcactacagccac

SEQ ID NO: 12253 - DNA, 122 bp, Homo sapiens
  misc_feature (61)..(62): /note="This region represents a CpG dinucleotide"
  misc_feature (61)..(61): /note="Nucleotide may be methylated to form 5-methylcytosine"
ccaacctcaacaggccagaatgagataatactggattgaaacgtaccagcaggccaggcgcggtggctcacgcctgtaatcccagcactttgggaagctgaggcgagagggtcacaaggtca

SEQ ID NO: 12254 - DNA, 122 bp, Homo sapiens
  misc_feature (61)..(62): /note="This region represents a CpG dinucleotide"
  misc_feature (61)..(61): /note="Nucleotide may be methylated to form 5-methylcytosine"
gccacccactcactgaagttcccatggacttgtaaaacagccatgtgacctcaggcaaggcgcttaatgttgctgcacctctattggaagaattcagtgaggaatgcgtgatagggccaagg

SEQ ID NO: 12255 - DNA, 122 bp, Homo sapiens
  misc_feature (61)..(62): /note="This region represents a CpG dinucleotide"
  misc_feature (61)..(61): /note="Nucleotide may be methylated to form 5-methylcytosine"
tacacacaggcaaactagatcctgtgaggacaaattgcaacctgcatctgtatttccttgcgtccaacctcagtgatgtgagggacttataggattaggtagtacctttggcaacactgctg

SEQ ID NO: 12256 - DNA, 122 bp, Homo sapiens
  misc_feature (61)..(62): /note="This region represents a CpG dinucleotide"
  misc_feature (61)..(61): /note="Nucleotide may be methylated to form 5-methylcytosine"
gtattctctggttattctgggatcatttcattcaagacctccccatccctggcaccaactcgacataccagaatcctggtctgtagacaaagctgtggttctggggcagcacagagctgttt

SEQ ID NO: 12257 - DNA, 122 bp, Homo sapiens
  misc_feature (61)..(62): /note="This region represents a CpG dinucleotide"
  misc_feature (61)..(61): /note="Nucleotide may be methylated to form 5-methylcytosine"
agccagcttccagcaggcagggctgggaggttgaacttgagccggtttgggagccaggagcgagtgggtgacaggtcattcctgactgggaaggttgcttgacaagtcaggattgtgcctcc

SEQ ID NO: 12258 - DNA, 122 bp, Homo sapiens
  misc_feature (61)..(62): /note="This region represents a CpG dinucleotide"
  misc_feature (61)..(61): /note="Nucleotide may be methylated to form 5-methylcytosine"
cagtctgatattgtttccttttctaaaatgtggtttaatttcgtaaagagccgagtaggacggcagagctgaatcataggaaatgtcagcatgcaagctctacacccatgattacaaaacgg

SEQ ID NO: 12259 - DNA, 122 bp, Homo sapiens
  misc_feature (61)..(62): /note="This region represents a CpG dinucleotide"
  misc_feature (61)..(61): /note="Nucleotide may be methylated to form 5-methylcytosine"
aacaggcctcccagccctgtgtcggagcaactgaaacgagggttaaatgaggaaaccatgcgacagatgtcagcataatccctgccacgcagaggaggcaaaatcactttgaagggttaaaa

SEQ ID NO: 12260 - DNA, 122 bp, Homo sapiens
  misc_feature (61)..(62): /note="This region represents a CpG dinucleotide"
  misc_feature (61)..(61): /note="Nucleotide may be methylated to form 5-methylcytosine"
agaaaaacacctatactcatacccagagtccctctcatctgctgacagcttcccaggaagcgtacaaatagctacccttccttgagccttattgaaacttgctcttcagatacccacaccat

SEQ ID NO: 12261 - DNA, 122 bp, Homo sapiens
  misc_feature (61)..(62): /note="This region represents a CpG dinucleotide"
  misc_feature (61)..(61): /note="Nucleotide may be methylated to form 5-methylcytosine"
ttattgttcaacagaatgatctggttgagcggctttttgtacctcacaatacaaccaaaacgcttactctgtacttagatcaagttgctgtattaatgtagtgtgcaaggctgtgcacaaca

SEQ ID NO: 12262 - DNA, 122 bp, Homo sapiens
  misc_feature (61)..(62): /note="This region represents a CpG dinucleotide"
  misc_feature (61)..(61): /note="Nucleotide may be methylated to form 5-methylcytosine"
caaagcgttcttcattgccacagttttctgtgtgtcaatgcactctcatctacattatatcgtgctacagcatgtctgcaaaggaagtatttcttcacagtgattattatgatgcatctggt

SEQ ID NO: 12263 - DNA, 122 bp, Homo sapiens
  misc_feature (61)..(62): /note="This region represents a CpG dinucleotide"
  misc_feature (61)..(61): /note="Nucleotide may be methylated to form 5-methylcytosine"
aagtgaatatatgggcacaggtgtgagggaggagaagccttgggcctttgggcagccaggcgacttacaaaagaagacgcagagttgacagttggatttaaagtgtttgtgccagtcaggca

SEQ ID NO: 12264 - DNA, 122 bp, Homo sapiens
  misc_feature (61)..(62): /note="This region represents a CpG dinucleotide"
  misc_feature (61)..(61): /note="Nucleotide may be methylated to form 5-methylcytosine"
acttgttctaccctggtttgaggagtctgactgctctgagcctctgctcccctcccaagacgaggagatcagcactcggagacccgggagaggctgggctggctccctggccaggaggactc

SEQ ID NO: 12265 - DNA, 122 bp, Homo sapiens
  misc_feature (61)..(62): /note="This region represents a CpG dinucleotide"
  misc_feature (61)..(61): /note="Nucleotide may be methylated to form 5-methylcytosine"
caatgtttgtgtccctccaaaattcatgttaaaatcttaggccctgaagtgatggtattacgtagggccttttgggagatgattagttcattaggtctccacccttataaaagattagcgct

SEQ ID NO: 12266 - DNA, 122 bp, Homo sapiens
  misc_feature (61)..(62): /note="This region represents a CpG dinucleotide"
  misc_feature (61)..(61): /note="Nucleotide may be methylated to form 5-methylcytosine"
acctgtcctgcagattcactagtacttgacagcatggtgcagtctcattcctcatgccttcgcattgtggcccgccacgctcctgagaaggacacacctccatagcatggagaggaaacaga

SEQ ID NO: 12267 - DNA, 122 bp, Homo sapiens
  misc_feature (61)..(62): /note="This region represents a CpG dinucleotide"
  misc_feature (61)..(61): /note="Nucleotide may be methylated to form 5-methylcytosine"
ggaaaacatccatcacccagtgacaggttaggtcgactgtcccaacagatggatgtctgccgttgcacacattaaggaaacagagttgatcactccaaggatacaataaaatctcagaactt

SEQ ID NO: 12268 - DNA, 122 bp, Homo sapiens
  misc_feature (61)..(62): /note="This region represents a CpG dinucleotide"
  misc_feature (61)..(61): /note="Nucleotide may be methylated to form 5-methylcytosine"
tgtgcctcaggcagggcctgctcaccggtgtgaatagtagaacaagacttcctcgatcagcgtgaagatggccagctccaggaggaaccagtggaaggtgggtagctcacggcggcaggggt

SEQ ID NO: 12269 - DNA, 122 bp, Homo sapiens
  misc_feature (61)..(62): /note="This region represents a CpG dinucleotide"
  misc_feature (61)..(61): /note="Nucleotide may be methylated to form 5-methylcytosine"
agaaggctttgcactcgtcacacctacgcatcttgtctccaggaggtaacagggagggtgcgggggaggctgctgagtggttttgaaattatacagagctggatttgaacccctttcagcga

SEQ ID NO: 12270 - DNA, 122 bp, Homo sapiens
  misc_feature (61)..(62): /note="This region represents a CpG dinucleotide"
  misc_feature (61)..(61): /note="Nucleotide may be methylated to form 5-methylcytosine"
cctaccaccacaagataaactccagaagggcgagaaccatgtgttttctttgccactatacgtgtagcatccatttcaatacctcaggtgagctgggtagagtgacacgtacatgtagttcc

SEQ ID NO: 12271 - DNA, 122 bp, Homo sapiens
  misc_feature (61)..(62): /note="This region represents a CpG dinucleotide"
  misc_feature (61)..(61): /note="Nucleotide may be methylated to form 5-methylcytosine"
acctcaggtgatctgcctgcgtcggcctcccaaagtgtggagatgacaggtgtgagccaccggcctggccagaactaaccacaaatcttgagtttaggatttgggtgtcatagagagaaggt

SEQ ID NO: 12272 - DNA, 122 bp, Homo sapiens
  misc_feature (61)..(62): /note="This region represents a CpG dinucleotide"
  misc_feature (61)..(61): /note="Nucleotide may be methylated to form 5-methylcytosine"
ttcaactcaaagatagaaaagagaaattttgtatgtgatgcaaatgagtcatctttgctgcggaggagtgatagcgatggattactctagtgtgccttaagacctaacttctttcaaaccag

SEQ ID NO: 12273 - DNA, 122 bp, Homo sapiens
  misc_feature (61)..(62): /note="This region represents a CpG dinucleotide"
  misc_feature (61)..(61): /note="Nucleotide may be methylated to form 5-methylcytosine"
aaaatttagaatacttgagtcacttactctttcctggtttccaaacaggctctgtggagacgtgtgagagcctaaggtttattactcgggtgtcagctcattcattccccaccgcaaacctc

SEQ ID NO: 12274 - DNA, 122 bp, Homo sapiens
  misc_feature (61)..(62): /note="This region represents a CpG dinucleotide"
  misc_feature (61)..(61): /note="Nucleotide may be methylated to form 5-methylcytosine"
aaggccatgccagtcaaaggtgatgtcatgcaccctataggtcactatgactcagtataccgtggcttgctctgataacctgactctggcagaacatcacatgatgattagcagactcctgg

SEQ ID NO: 12275 - DNA, 122 bp, Homo sapiens
  misc_feature (61)..(62): /note="This region represents a CpG dinucleotide"
  misc_feature (61)..(61): /note="Nucleotide may be methylated to form 5-methylcytosine"
ttctggcttctcagggctctgttctatcatgtttcctgtgaactccttttgtgcctaagacgctgggcagtgccactcttgcagaggtgccactccaggccctgcacgcttaggggtagagc

SEQ ID NO: 12276 - DNA, 122 bp, Homo sapiens
  misc_feature (61)..(62): /note="This region represents a CpG dinucleotide"
  misc_feature (61)..(61): /note="Nucleotide may be methylated to form 5-methylcytosine"
aggtctcaatttatttttcccaacttaatgtactcacaacaaatgcttgcatcaccccatcgcaactctccttcttaacaatgaaggtaaaactcaggaccaaaagagagctcctagagctg

SEQ ID NO: 12277 - DNA, 122 bp, Homo sapiens
  misc_feature (61)..(62): /note="This region represents a CpG dinucleotide"
  misc_feature (61)..(61): /note="Nucleotide may be methylated to form 5-methylcytosine"
gtccttcaggtctcaccttattaagaaccataattaccacttaatttgagccaggaactacgctaaatgtttcctatgcactatcaggctgaacacttctaaacaccctataagctgagtgt

SEQ ID NO: 12278 - DNA, 122 bp, Homo sapiens
  misc_feature (61)..(62): /note="This region represents a CpG dinucleotide"
  misc_feature (61)..(61): /note="Nucleotide may be methylated to form 5-methylcytosine"
gagctgtccgtctggtgtgaatatatgaagccagcgttctcttcctgtctcccagaagggcggctgcgtgtgacagcgtaaatgtgtgacagtatgtgaaaatgtttctgtaatcctgaaga

SEQ ID NO: 12279 - DNA, 122 bp, Homo sapiens
  misc_feature (61)..(62): /note="This region represents a CpG dinucleotide"
  misc_feature (61)..(61): /note="Nucleotide may be methylated to form 5-methylcytosine"
gtgggtcagatagcaagatatgtagcatgaggcaggcatgacacatgcttcggtgttccgcgctgagtaccatgggaaggcacaagcgggcctgtactcttgcctcatgaggaagtggttat

SEQ ID NO: 12280 - DNA, 122 bp, Homo sapiens
  misc_feature (61)..(62): /note="This region represents a CpG dinucleotide"
  misc_feature (61)..(61): /note="Nucleotide may be methylated to form 5-methylcytosine"
aaaaaaaaaaaaagaagaagaagaagaacttgtaaacagaaaaggaacttgaaactcttgcgtaagacacaaaagtaagggtttccaactgggacaggcttagctgtgcatcctaatcaaag

SEQ ID NO: 12281 - DNA, 122 bp, Homo sapiens
  misc_feature (61)..(62): /note="This region represents a CpG dinucleotide"
  misc_feature (61)..(61): /note="Nucleotide may be methylated to form 5-methylcytosine"
atgtaaggttttcagagggagtagtcacaaaagctttcagaggaagtactggttttcttgcgtctttctgcagttaacatttcatttcctcctctaaggtggatcctgttttagtgaataat

SEQ ID NO: 12282 - DNA, 122 bp, Homo sapiens
  misc_feature (61)..(62): /note="This region represents a CpG dinucleotide"
  misc_feature (61)..(61): /note="Nucleotide may be methylated to form 5-methylcytosine"
ggaacactgcaaaactgttcccaaaactgcaccctaagtgtggttatttcacacccatggcggcgggcttagaacgaggttttatttcttctcctcctttctctgtggcaccaattgtgttg

SEQ ID NO: 12283 - DNA, 122 bp, Homo sapiens
  misc_feature (61)..(62): /note="This region represents a CpG dinucleotide"
  misc_feature (61)..(61): /note="Nucleotide may be methylated to form 5-methylcytosine"
aagttgttttgaaaagagattaatatgtgagtagactctattcattaaaaatgcagggttcgctaagcctccattatgatactgggaagtcacagatgagtaagacatagtcatggctctca

SEQ ID NO: 12284 - DNA, 122 bp, Homo sapiens
  misc_feature (61)..(62): /note="This region represents a CpG dinucleotide"
  misc_feature (61)..(61): /note="Nucleotide may be methylated to form 5-methylcytosine"
gtgaacactatggggtgataaagagtccctttcttatgttcctgctcagccactgggtgacgtgaccttgtgcaaatccaccccactctaaatctgttctctttacctgtaacagaaggatt

SEQ ID NO: 12285 - DNA, 122 bp, Homo sapiens
  misc_feature (61)..(62): /note="This region represents a CpG dinucleotide"
  misc_feature (61)..(61): /note="Nucleotide may be methylated to form 5-methylcytosine"
tcttttctgcatctaactctcttcattcaagatccaggcgggaccgggtgcggtggctcacggctgtaatcccaacactttgggacccaaggctgaggcagtagggtcacttgaggtcagga

SEQ ID NO: 12286 - DNA, 122 bp, Homo sapiens
  misc_feature (61)..(62): /note="This region represents a CpG dinucleotide"
  misc_feature (61)..(61): /note="Nucleotide may be methylated to form 5-methylcytosine"
acagcacagcatacagtggtcagtagatcatcagcttactcctggtctcctgttgtgaaacgctctcagatgaattgttcttgtgccatgacacaccaacgtggcaagttcctcagttgcct

SEQ ID NO: 12287 - DNA, 122 bp, Homo sapiens
  misc_feature (61)..(62): /note="This region represents a CpG dinucleotide"
  misc_feature (61)..(61): /note="Nucleotide may be methylated to form 5-methylcytosine"
cactcccacagtgaacccctctaggtgcaattacaggatgattttgtgtctcgtgggtgtcgctgctagggtggagggccacgcctcctcttttgaattctgactttcctgcctaggagtgt

SEQ ID NO: 12288 - DNA, 122 bp, Homo sapiens
  misc_feature (61)..(62): /note="This region represents a CpG dinucleotide"
  misc_feature (61)..(61): /note="Nucleotide may be methylated to form 5-methylcytosine"
cttgctcagccccacccgtcttttcctccatccctgcaggtgaggcagggcaaggtcacccggcaggggaagttcaagcccaacagcgtcacatataggaccaaatcaggcaacatcctgct

SEQ ID NO: 12289 - DNA, 122 bp, Homo sapiens
  misc_feature (61)..(62): /note="This region represents a CpG dinucleotide"
  misc_feature (61)..(61): /note="Nucleotide may be methylated to form 5-methylcytosine"
tcatactacgttcccttgcataatattcacaagatcctacttttggagagtggtgttggccgctcctagctggtgaataacacagaaacatcccaaagcctcttctcagcaaggatggggac

SEQ ID NO: 12290 - DNA, 122 bp, Homo sapiens
  misc_feature (61)..(62): /note="This region represents a CpG dinucleotide"
  misc_feature (61)..(61): /note="Nucleotide may be methylated to form 5-methylcytosine"
catctgaaaatgcctaagctaacaaaactgagtttaggacatctgcctttggcccattcacgttaaccaccacgtccctggagactggttttcctcctaatatggtgaaatatgccaaaagc

SEQ ID NO: 12291 - DNA, 122 bp, Homo sapiens
  misc_feature (61)..(62): /note="This region represents a CpG dinucleotide"
  misc_feature (61)..(61): /note="Nucleotide may be methylated to form 5-methylcytosine"
catctagggtagttactccccaggatccttggaatactctacctcgtgccttgttaattacggggttttccagtttggctggtgggaacaggcattgttcttgttctgtttgagtgccagtt

SEQ ID NO: 12292 - DNA, 122 bp, Homo sapiens
  misc_feature (61)..(62): /note="This region represents a CpG dinucleotide"
  misc_feature (61)..(61): /note="Nucleotide may be methylated to form 5-methylcytosine"
actatagattattttatttaatccacacgagcacactatgaggcaggtacttattattgccgcttttcaaatgtggaaggtgaggcacacggcagttaaataacttgcctaggctcatactc

SEQ ID NO: 12293 - DNA, 122 bp, Homo sapiens
  misc_feature (61)..(62): /note="This region represents a CpG dinucleotide"
  misc_feature (61)..(61): /note="Nucleotide may be methylated to form 5-methylcytosine"
ctgcctcgtgaactagacagcagatatcttattacttgcacttaacatggggcagcctagcgattgagtaactgggttgggttggcaacagctacccggcttcacttatgaataatagtaat

SEQ ID NO: 12294 - DNA, 122 bp, Homo sapiens
  misc_feature (61)..(62): /note="This region represents a CpG dinucleotide"
  misc_feature (61)..(61): /note="Nucleotide may be methylated to form 5-methylcytosine"
attatgttacatttatataagattctgtcttgctagcagactgctctagagactccttaccggcttgatgaagttacaatagcagctgtgttaggaaagcctgtgtgatgagtaactgcagg

SEQ ID NO: 12295 - DNA, 122 bp, Homo sapiens
  misc_feature (61)..(62): /note="This region represents a CpG dinucleotide"
  misc_feature (61)..(61): /note="Nucleotide may be methylated to form 5-methylcytosine"
cagagaaagccaaatatgcttccctaaccaatcacgtaggcagcctctcttctagtgagccgcctcagctttccaaggcaggctgtctgaactgcaacagggctcacctgtttcccactgtg

SEQ ID NO: 12296 - DNA, 122 bp, Homo sapiens
  misc_feature (61)..(62): /note="This region represents a CpG dinucleotide"
  misc_feature (61)..(61): /note="Nucleotide may be methylated to form 5-methylcytosine"
tcattttcctccctgcaatgcttctgaaatagctaattggatgattcattcctatggatgcgtctgccccattcagaaactgtttatggcagtgaacaaaactaactctctaatgtgtggag

SEQ ID NO: 12297 - DNA, 122 bp, Homo sapiens
  misc_feature (61)..(62): /note="This region represents a CpG dinucleotide"
  misc_feature (61)..(61): /note="Nucleotide may be methylated to form 5-methylcytosine"
ctccagaagagagagtgaattcaccctcctcccacagttttattctctctaggccctcaacggcttgggtgatgcccacacaccttggtgagagcaaattcctctctactcagactactgat

SEQ ID NO: 12298 - DNA, 122 bp, Homo sapiens
  misc_feature (61)..(62): /note="This region represents a CpG dinucleotide"
  misc_feature (61)..(61): /note="Nucleotide may be methylated to form 5-methylcytosine"
gatgtacagctcggaggactccaccctggcctctgttccccctgctgccacctttggggccgatgacttggtactgaccctgagcaacccccagatgtcattggagggtacaggtgggtctc

SEQ ID NO: 12299 - DNA, 122 bp, Homo sapiens
  misc_feature (61)..(62): /note="This region represents a CpG dinucleotide"
  misc_feature (61)..(61): /note="Nucleotide may be methylated to form 5-methylcytosine"
tgaatagtgcttgtgtattgagacttgctcttttactgcttttgggaaccctgagaccttcgtcatgtgaataatctctggctagcctcctgaatgatgagacacatggtccagttatctcc

SEQ ID NO: 12300 - DNA, 122 bp, Homo sapiens
  misc_feature (61)..(62): /note="This region represents a CpG dinucleotide"
  misc_feature (61)..(61): /note="Nucleotide may be methylated to form 5-methylcytosine"
agccttggtttggtgactaatgattcattgtgctgctgctctggaagggccatacactcacggagaccaggatcttaagcctcagggccaccctctgtaagccaagtggaggcaaaattgag

SEQ ID NO: 12301 - DNA, 122 bp, Homo sapiens
  misc_feature (61)..(62): /note="This region represents a CpG dinucleotide"
  misc_feature (61)..(61): /note="Nucleotide may be methylated to form 5-methylcytosine"
caggctccaggagcttcggcaggaaacagctgcccctgccccttggatcatccatacctgcgtggctgaagctgtaactctggtcatgtggcctctggcaaagatgctatgagccatggtgt

SEQ ID NO: 12302 - DNA, 122 bp, Homo sapiens
  misc_feature (61)..(62): /note="This region represents a CpG dinucleotide"
  misc_feature (61)..(61): /note="Nucleotide may be methylated to form 5-methylcytosine"
cctccatgagtcaagccagatccagcggcttagtcaacaagaagcacaacacagaaagtgcgtgtttgagagatgacagggagatgtcatgggcagatgtgcctataaagaagaatgtaaca

SEQ ID NO: 12303 - DNA, 122 bp, Homo sapiens
  misc_feature (61)..(62): /note="This region represents a CpG dinucleotide"
  misc_feature (61)..(61): /note="Nucleotide may be methylated to form 5-methylcytosine"
tggtaagagcctgggaagagatgctgtctgtggtgagcacgtgatagacattccacgacccgacctgtcggtgccctggttctcattgtttcttctcatttccagctgcatttatctcttgt

SEQ ID NO: 12304 - DNA, 122 bp, Homo sapiens
  misc_feature (61)..(62): /note="This region represents a CpG dinucleotide"
  misc_feature (61)..(61): /note="Nucleotide may be methylated to form 5-methylcytosine"
aggtgttacaggggaataaaacacaatttaatttaggcacataagattattttagaacaacgggataagttccacaattgaagtattgccaggtgacaaagttgcccaaggaagaaagagat

SEQ ID NO: 12305 - DNA, 122 bp, Homo sapiens
  misc_feature (61)..(62): /note="This region represents a CpG dinucleotide"
  misc_feature (61)..(61): /note="Nucleotide may be methylated to form 5-methylcytosine"
ccaaaggatctgatcgcccgtcactaaggctactaatcaaatttccatccaatatgctcacgcaggatttcctgatcaaacacttaagcctgcccctctgcacccccattagctaacatgtt

SEQ ID NO: 12306 - DNA, 122 bp, Homo sapiens
  misc_feature (61)..(62): /note="This region represents a CpG dinucleotide"
  misc_feature (61)..(61): /note="Nucleotide may be methylated to form 5-methylcytosine"
tcagcacctgcatgggcagttaggcagggtttacaatcctttcagcccagagcagcagggcgcctgccctgtattttttgttactttctttttcattcagtaaatgtcaatcactgcgggcc

SEQ ID NO: 12307 - DNA, 122 bp, Homo sapiens
  misc_feature (61)..(62): /note="This region represents a CpG dinucleotide"
  misc_feature (61)..(61): /note="Nucleotide may be methylated to form 5-methylcytosine"
ctaatagcaagcttgggcttgcctagttaagaaagccgacagattatgacaaacatagagcgcatttttgtaccaagagatgtcaggcctttgtgttcagtgatgtttgggctgaagtttgc

SEQ ID NO: 12308 - DNA, 122 bp, Homo sapiens
  misc_feature (61)..(62): /note="This region represents a CpG dinucleotide"
  misc_feature (61)..(61): /note="Nucleotide may be methylated to form 5-methylcytosine"
ggaggagtaggaggtgcagtagggccgtcttcaggtggtagctgctgagcccgctgggaccggtcaggcggctctgcttggagagcaggaaggatgctatctgcaggcagctgaggtggcag

SEQ ID NO: 12309 - DNA, 122 bp, Homo sapiens
  misc_feature (61)..(62): /note="This region represents a CpG dinucleotide"
  misc_feature (61)..(61): /note="Nucleotide may be methylated to form 5-methylcytosine"
taacctcccaatggggcaagattactcaccatgacgggcagctcagtgcatggcaacaagcgtatgctctgctgggcagccttcttggctggaaaactggctcgtgattctgactgtgactc

SEQ ID NO: 12310 - DNA, 122 bp, Homo sapiens
  misc_feature (61)..(62): /note="This region represents a CpG dinucleotide"
  misc_feature (61)..(61): /note="Nucleotide may be methylated to form 5-methylcytosine"
aaccctggacaggtcctgacagattaccgagactgaggtttttaactcatcatccttgggcgtgcattaaagggtccatgaggcctttgaaagtatgtgtatgggtgtgtatacataattcc

SEQ ID NO: 12311 - DNA, 122 bp, Homo sapiens
  misc_feature (61)..(62): /note="This region represents a CpG dinucleotide"
  misc_feature (61)..(61): /note="Nucleotide may be methylated to form 5-methylcytosine"
ctcaatggcattactggatccaggttaggattatctgagaatacatttatctgcattttacggaaggcaaccgaggttcatagagatagtgatttggccagcgtcacaggcccagtaaaagg

SEQ ID NO: 12312 - DNA, 122 bp, Homo sapiens
  misc_feature (61)..(62): /note="This region represents a CpG dinucleotide"
  misc_feature (61)..(61): /note="Nucleotide may be methylated to form 5-methylcytosine"
gtgggtgtggccaagaagatggggctcactcccagctctcaatcagttgctacaacgtctcgctgggaggcttaagccaacagcatttctcattctgcctccaggtcttgttacagagcctg

SEQ ID NO: 12313 - DNA, 122 bp, Homo sapiens
  misc_feature (61)..(62): /note="This region represents a CpG dinucleotide"
  misc_feature (61)..(61): /note="Nucleotide may be methylated to form 5-methylcytosine"
ttctgggaggtcaaggcttgttctggccagcctcacaggtaattccagtggctggatacccgcattgtggggccttaccttgcacagctgctgccttcaaggagcttataagtgagggtctg

SEQ ID NO: 12314 - DNA, 122 bp, Homo sapiens
  misc_feature (61)..(62): /note="This region represents a CpG dinucleotide"
  misc_feature (61)..(61): /note="Nucleotide may be methylated to form 5-methylcytosine"
aaaaaaaaaaaagcagcagcagcaaaagtgcacagacccagcgtgcacgcgtctccgccacgcctcactcccgtctgcgcctggatccaccgccacccgcttgtataaaaagtgggccccac

SEQ ID NO: 12315 - DNA, 122 bp, Homo sapiens
  misc_feature (61)..(62): /note="This region represents a CpG dinucleotide"
  misc_feature (61)..(61): /note="Nucleotide may be methylated to form 5-methylcytosine"
tccttactgtacagatgggatgtcttcccacccagtgttacagcacctcaggccatctctcgaggacacctcctctatctgctctgtagagcctgcccaccccatcttgctgtctcaattaa

SEQ ID NO: 12316 - DNA, 122 bp, Homo sapiens
  misc_feature (61)..(62): /note="This region represents a CpG dinucleotide"
  misc_feature (61)..(61): /note="Nucleotide may be methylated to form 5-methylcytosine"
tctgacattcagtgggtgagtaagagaggtcaggactgggtgaaggccaggcaggagaaacgagactagaagtaacatgccaaactgagatccaatgctgagagctactgagttggcttatt

SEQ ID NO: 12317 - DNA, 122 bp, Homo sapiens
  misc_feature (61)..(62): /note="This region represents a CpG dinucleotide"
  misc_feature (61)..(61): /note="Nucleotide may be methylated to form 5-methylcytosine"
tctgaggcccgggggattctggaagcattttccctccgcctcttctgagcacttcctgcacggtgcccatgtcagagcactcaaggacagaaatgtctccagggcatcccaattgcctgtct

SEQ ID NO: 12318 - DNA, 122 bp, Homo sapiens
  misc_feature (61)..(62): /note="This region represents a CpG dinucleotide"
  misc_feature (61)..(61): /note="Nucleotide may be methylated to form 5-methylcytosine"
atgacgttggcagtcataacaacagctgcttgcccaggccagccactgtgcccagctctccgctatctcatgtaatgcccaggtcagccctggtaagggaggcatctacactcacagatgag

SEQ ID NO: 12319 - DNA, 122 bp, Homo sapiens
  misc_feature (61)..(62): /note="This region represents a CpG dinucleotide"
  misc_feature (61)..(61): /note="Nucleotide may be methylated to form 5-methylcytosine"
atgcactgtagtaagctggattcatgtgatatttattccttcctccccaggtttgctcttcgttttatacggcctgaccctcgcagccgggtcactgaccccgttggggacattgtttcatt

SEQ ID NO: 12320 - DNA, 122 bp, Homo sapiens
  misc_feature (61)..(62): /note="This region represents a CpG dinucleotide"
  misc_feature (61)..(61): /note="Nucleotide may be methylated to form 5-methylcytosine"
gcaaacaaatgatattgcttcctcatggcagaggactaagtaatcggcacatttatcaaccgctgcttggccttgtggctgttcagatattgtatgtgccacgacatcgtttcctttgtggc

SEQ ID NO: 12321 - DNA, 122 bp, Homo sapiens
  misc_feature (61)..(62): /note="This region represents a CpG dinucleotide"
  misc_feature (61)..(61): /note="Nucleotide may be methylated to form 5-methylcytosine"
gaggctcccccaccctcagctgcttccctgcaagtgccccgtgtctgcatcccatgcttgcgcagtggctaattctggtgtctcatcagacagtaattatgggggaatcagcagtgccgtca

SEQ ID NO: 12322 - DNA, 122 bp, Homo sapiens
  misc_feature (61)..(62): /note="This region represents a CpG dinucleotide"
  misc_feature (61)..(61): /note="Nucleotide may be methylated to form 5-methylcytosine"
tgcttctggttccattcaatttaaaccacctactgggtgcttaatagtcttggccgggtgcgtggcacacgcctataatcccagcactttgggaggccgaggtgggtggatcacctgaggtc

SEQ ID NO: 12323 - DNA, 122 bp, Homo sapiens
  misc_feature (61)..(62): /note="This region represents a CpG dinucleotide"
  misc_feature (61)..(61): /note="Nucleotide may be methylated to form 5-methylcytosine"
gatctgtgactccccggtgcccctgccagaattgatctcgaaatggtggattacaacagccgtggtacatccacaagctgcctgggagtttcttgtcttctcatcacagtcaaaatggctta

SEQ ID NO: 12324 - DNA, 122 bp, Homo sapiens
  misc_feature (61)..(62): /note="This region represents a CpG dinucleotide"
  misc_feature (61)..(61): /note="Nucleotide may be methylated to form 5-methylcytosine"
tcttctttcagagtcactgaaacctgtgactcaaactctctgacataccagaggagggtgcgaggtgctaaaacaggtcacaaggcttgaagtagctgatgcaaactgactcagggaagaga

SEQ ID NO: 12325 - DNA, 122 bp, Homo sapiens
  misc_feature (61)..(62): /note="This region represents a CpG dinucleotide"
  misc_feature (61)..(61): /note="Nucleotide may be methylated to form 5-methylcytosine"
acgtgagaatgcagattagaaaggcggtaacaccacgtctgaggggaacagaaagggtcgcggcacgctggaaagcagtttggtgatgtcacatcaagtcagcagatgtcttacgtcccagc

SEQ ID NO: 12326 - DNA, 122 bp, Homo sapiens
  misc_feature (61)..(62): /note="This region represents a CpG dinucleotide"
  misc_feature (61)..(61): /note="Nucleotide may be methylated to form 5-methylcytosine"
tgatgaaggtggacgattgaattctatggcatgtaaatgctttgcgtaatcacagggcaacggggaggatgttcctgagaaatgagattgtttataattatggttacttttgacacaccctc

SEQ ID NO: 12327 - DNA, 122 bp, Homo sapiens
  misc_feature (61)..(62): /note="This region represents a CpG dinucleotide"
  misc_feature (61)..(61): /note="Nucleotide may be methylated to form 5-methylcytosine"
ttaagactaaacccactggaaaccagccacggtgatacaatctgcagagttcatctttctcggtcacagtgtagggcagaggagtatgtagaatggagtgaaggtgtggcaaatggaaaata

SEQ ID NO: 12328 - DNA, 122 bp, Homo sapiens
  misc_feature (61)..(62): /note="This region represents a CpG dinucleotide"
  misc_feature (61)..(61): /note="Nucleotide may be methylated to form 5-methylcytosine"
cctcaacagttaatctgagaaccaagccaactactaagtaactaacggggcaggttgcatcgacagtttagagacactggacaaagggatgattcacatcatagatgggatggagcaggatg

SEQ ID NO: 12329 - DNA, 122 bp, Homo sapiens
  misc_feature (61)..(62): /note="This region represents a CpG dinucleotide"
  misc_feature (61)..(61): /note="Nucleotide may be methylated to form 5-methylcytosine"
tggctcttgggacactccctcttagaacccagccaccatgctggagacagatcaggtaagcgtgccgttcaacagccctagctaagctcccagctgactgccagcattagccaccaatgtgg

SEQ ID NO: 12330 - DNA, 122 bp, Homo sapiens
  misc_feature (61)..(62): /note="This region represents a CpG dinucleotide"
  misc_feature (61)..(61): /note="Nucleotide may be methylated to form 5-methylcytosine"
ggaggtcaaggctgcagtgagtcatgattgcaccactgcactccagcctgggcaacagagcgagactgtatcaaagaaaaaagaaaaatttgtttctgagacctgggatatcttctatcctc

SEQ ID NO: 12331 - DNA, 122 bp, Homo sapiens
  misc_feature (61)..(62): /note="This region represents a CpG dinucleotide"
  misc_feature (61)..(61): /note="Nucleotide may be methylated to form 5-methylcytosine"
agccatcttctggctatgattgccacgtgtctgaaaatactaacaaggtttctaacaagacgagtcattttcgtgcctttgaactgagtcaggtatagttacctgtgaatgagtaacaccca

SEQ ID NO: 12332 - DNA, 122 bp, Homo sapiens
  misc_feature (61)..(62): /note="This region represents a CpG dinucleotide"
  misc_feature (61)..(61): /note="Nucleotide may be methylated to form 5-methylcytosine"
aagaagttggagtcccagagatgtttgctttccctatagaaattaaagatagtatcttcacgtatgtccctgagttgtctttcagaggcttggaccccctaactgaggaccccccaaactga

SEQ ID NO: 12333 - DNA, 122 bp, Homo sapiens
  misc_feature (61)..(62): /note="This region represents a CpG dinucleotide"
  misc_feature (61)..(61): /note="Nucleotide may be methylated to form 5-methylcytosine"
agaatatgttatacatccctagggcctatttcagtgtctggcattgaataacaataaacacgtgtcaaatgcatcgagctaatactagtacctgcctaaaaggtggtggtgaggagcaaaga

SEQ ID NO: 12334 - DNA, 122 bp, Homo sapiens
  misc_feature (61)..(62): /note="This region represents a CpG dinucleotide"
  misc_feature (61)..(61): /note="Nucleotide may be methylated to form 5-methylcytosine"
catgccctcgaggacacattgaaatgaacgctcaatcctgaaatccaccaaatgagggctcgccttgccacagactggcctgattagaggggctgagtcctctccatggggcccgctggagg

SEQ ID NO: 12335 - DNA, 122 bp, Homo sapiens
  misc_feature (61)..(62): /note="This region represents a CpG dinucleotide"
  misc_feature (61)..(61): /note="Nucleotide may be methylated to form 5-methylcytosine"
aatctcattttaagccttctaataacttatgactccagttttgtcctccaaattcaactacgttattcattaattccacaaacaatggctgagattatactctgtatcaggcagtgttctag

SEQ ID NO: 12336 - DNA, 122 bp, Homo sapiens
  misc_feature (61)..(62): /note="This region represents a CpG dinucleotide"
  misc_feature (61)..(61): /note="Nucleotide may be methylated to form 5-methylcytosine"
aactgccgacctctttccactccaattgcggtgaaagtgatatctctctgcctgagctgacgttggcctttaggcttctctaattatttccttaggttagatttctagaaacacagggtcaa

SEQ ID NO: 12337 - DNA, 122 bp, Homo sapiens
  misc_feature (61)..(62): /note="This region represents a CpG dinucleotide"
  misc_feature (61)..(61): /note="Nucleotide may be methylated to form 5-methylcytosine"
caatgaccccgtattctggattgcagtcattcccaaagtccacaggataagggtgatatgcgtcacgtaaggatcccagactcatcagactctagggagtaccaggtgccaacaaagaaagc

SEQ ID NO: 12338 - DNA, 122 bp, Homo sapiens
  misc_feature (61)..(62): /note="This region represents a CpG dinucleotide"
  misc_feature (61)..(61): /note="Nucleotide may be methylated to form 5-methylcytosine"
ggaaaacgtgatacttgcaagagtttaaaacaacttgtaacaactggcagtgaggcggggcgcgtggagagagcaggataccaaaaaagctgtgtgtggcaatgcggggtggaggctgacct

SEQ ID NO: 12339 - DNA, 122 bp, Homo sapiens
  misc_feature (61)..(62): /note="This region represents a CpG dinucleotide"
  misc_feature (61)..(61): /note="Nucleotide may be methylated to form 5-methylcytosine"
aacatctctgggtctgttgttacacatacttacatcactctgaatttgattgacattcctcgtatgctcaagactcatggcgtcaggtaggtatgtgtaatgatgcaatggctgtttgtagt

SEQ ID NO: 12340 - DNA, 122 bp, Homo sapiens
  misc_feature (61)..(62): /note="This region represents a CpG dinucleotide"
  misc_feature (61)..(61): /note="Nucleotide may be methylated to form 5-methylcytosine"
actgcctaagcccaggagttcaaggctgctgtgagctatgactgccactatactccagatcgagagaaagagtgagatcccgtctcttaaaaaaaaaaaaaaaaaaaatgctgagtctggga

SEQ ID NO: 12341 - DNA, 122 bp, Homo sapiens
  misc_feature (61)..(62): /note="This region represents a CpG dinucleotide"
  misc_feature (61)..(61): /note="Nucleotide may be methylated to form 5-methylcytosine"
cctcatcatcttcttcatcgtcatcatcagcatcctattaataacaccaacaggctggggcgcagtggctcacgcctgtaatcccagcactttgggaggccgaggcgggcgaatcacctgag

SEQ ID NO: 12342 - DNA, 122 bp, Homo sapiens
  misc_feature (61)..(62): /note="This region represents a CpG dinucleotide"
  misc_feature (61)..(61): /note="Nucleotide may be methylated to form 5-methylcytosine"
ttttgatgagttcagttgttttgggggatggaaaggcgttttctggttaggaatgatgaacgggttggtttgctacttaggtaagtaagaagaaggggaactaatgagtaattgttgcacaa

SEQ ID NO: 12343 - DNA, 122 bp, Homo sapiens
  misc_feature (61)..(62): /note="This region represents a CpG dinucleotide"
  misc_feature (61)..(61): /note="Nucleotide may be methylated to form 5-methylcytosine"
tgaatgctttcaaaaggcagaatgagttaagacttagtcatgtctcttggatttggcaatcgagagcccattggttatttgctagtatggttttagttgagttctagggagagagatagatt

SEQ ID NO: 12344 - DNA, 122 bp, Homo sapiens
  misc_feature (61)..(62): /note="This region represents a CpG dinucleotide"
  misc_feature (61)..(61): /note="Nucleotide may be methylated to form 5-methylcytosine"
ggggtaagtttggccagagcaaatctctaaaagagggtgtagctttatgtcttagtgaagcggtgtcattgtctggagtaaatacctgagatttgtcatctcacaccaagaagattaaggac

SEQ ID NO: 12345 - DNA, 122 bp, Homo sapiens
  misc_feature (61)..(62): /note="This region represents a CpG dinucleotide"
  misc_feature (61)..(61): /note="Nucleotide may be methylated to form 5-methylcytosine"
tgtgtcaccatgtgcctggctttttctcagccacatgcatttgaggtctgcctgggttgtcgtgtgactcgagagtccattcctctttgtcgctgagaatatttcgttgtgtggatctacca

SEQ ID NO: 12346 - DNA, 122 bp, Homo sapiens
  misc_feature (61)..(62): /note="This region represents a CpG dinucleotide"
  misc_feature (61)..(61): /note="Nucleotide may be methylated to form 5-methylcytosine"
tttagaccagattgtttgttatgtatataactgtttgcatttcacttacttatcctcaatcgtcacatacctgggagggaaggaggctgcacagagcccccggagccccagccccacgtggt

SEQ ID NO: 12347 - DNA, 122 bp, Homo sapiens
  misc_feature (61)..(62): /note="This region represents a CpG dinucleotide"
  misc_feature (61)..(61): /note="Nucleotide may be methylated to form 5-methylcytosine"
aatctccatctcatagtaacctcaacagaaaccacagtgctctatcaatctaatagaagacgcaatcatagaaaagagacctagacaggcagcatagggaattactcacttccttactctta

SEQ ID NO: 12348 - DNA, 122 bp, Homo sapiens
  misc_feature (61)..(62): /note="This region represents a CpG dinucleotide"
  misc_feature (61)..(61): /note="Nucleotide may be methylated to form 5-methylcytosine"
gtcctgagcgtatgcagctgcagcagcaagtaagcaactgactagctctgtgtgggcctgcgtgctctcagaggaaagggaggagcaaaaaaggaagcagtgggcaggtcctgagtacctga

SEQ ID NO: 12349 - DNA, 122 bp, Homo sapiens
  misc_feature (61)..(62): /note="This region represents a CpG dinucleotide"
  misc_feature (61)..(61): /note="Nucleotide may be methylated to form 5-methylcytosine"
aggctatctatgctgatatacatcttggaaggacatgagttcccagaggggtatgtgtgccgtcagctgaagatgcctacgtaaggtcaccttgactttgacaatgattgagatcctgctcc

SEQ ID NO: 12350 - DNA, 122 bp, Homo sapiens
  misc_feature (61)..(62): /note="This region represents a CpG dinucleotide"
  misc_feature (61)..(61): /note="Nucleotide may be methylated to form 5-methylcytosine"
tttctctgaacaggccagttttctgggggcttaggggccctccagtctggcaaaagtaaccggtcttgctcagggtgcaagaacaacatctgactcatctccatgtgcccagcctgtcacag

SEQ ID NO: 12351 - DNA, 122 bp, Homo sapiens
  misc_feature (61)..(62): /note="This region represents a CpG dinucleotide"
  misc_feature (61)..(61): /note="Nucleotide may be methylated to form 5-methylcytosine"
gctacatgtcctatattctgtgccagtttcttaaattagaatcttggattgcatcctcagcgtgtcactgtagtggtattgctgggttgctatgatacagtgcttgttctataatttgtagc

SEQ ID NO: 12352 - DNA, 122 bp, Homo sapiens
  misc_feature (61)..(62): /note="This region represents a CpG dinucleotide"
  misc_feature (61)..(61): /note="Nucleotide may be methylated to form 5-methylcytosine"
acgatatttgaaagcatggtccgctggacagagtaaggccgaaacctgggcgcctcgggccggactccggagccgcagctgaatgctcggctcctgggcctaactcggtgacccccaccgcc

SEQ ID NO: 12353 - DNA, 122 bp, Homo sapiens
  misc_feature (61)..(62): /note="This region represents a CpG dinucleotide"
  misc_feature (61)..(61): /note="Nucleotide may be methylated to form 5-methylcytosine"
agaggtccagaagcttccccagatgtcaaaggccccagattacaaaaagattaggaactgcgttagatgaaggacttgttccggtttgggcaataccaaagcagttctcttacacaaggcag

SEQ ID NO: 12354 - DNA, 122 bp, Homo sapiens
  misc_feature (61)..(62): /note="This region represents a CpG dinucleotide"
  misc_feature (61)..(61): /note="Nucleotide may be methylated to form 5-methylcytosine"
ctggtggaaggaggaattcttcctcctctttctcgtctttctgggcaggtattgtgaggacggtatctgccctgtcagtatctacccaaacaatccagagctgtcaacagaaaaaccctctg

SEQ ID NO: 12355 - DNA, 122 bp, Homo sapiens
  misc_feature (61)..(62): /note="This region represents a CpG dinucleotide"
  misc_feature (61)..(61): /note="Nucleotide may be methylated to form 5-methylcytosine"
cccaaagtgttgggatacaggcgtgagccaccacgcccggccatctttcacatttagatgcgtaattcacctggaatttaatttcatgcgtggtgtgagggaagagtgatttcatttctatt

SEQ ID NO: 12356 - DNA, 122 bp, Homo sapiens
  misc_feature (61)..(62): /note="This region represents a CpG dinucleotide"
  misc_feature (61)..(61): /note="Nucleotide may be methylated to form 5-methylcytosine"
gaatgtgatttcaccaagtgttgcaggcccaggcacgttcagggcagtgaggatggcacacgctcgggagggcctggcctgtttgccctgtatgtgtttatcaaatgcctgctctccacgag

SEQ ID NO: 12357 - DNA, 122 bp, Homo sapiens
  misc_feature (61)..(62): /note="This region represents a CpG dinucleotide"
  misc_feature (61)..(61): /note="Nucleotide may be methylated to form 5-methylcytosine"
gcccaggccctgaaacagacagattctcaccccagcttgggctcatgggaagtgtgtggccgtgagcaaatgacttaacctctctgaacttgagtttactcagctgtgaaatggtcattgta

SEQ ID NO: 12358 - DNA, 122 bp, Homo sapiens
  misc_feature (61)..(62): /note="This region represents a CpG dinucleotide"
  misc_feature (61)..(61): /note="Nucleotide may be methylated to form 5-methylcytosine"
ataagtcggagtttctccaggctgggtcttaggtcacctgaaagcatcacccatggggagcggcctgcactgcagatgtcccgggccctgcccagatcagtcattctgagggtggggcctgc

SEQ ID NO: 12359 - DNA, 122 bp, Homo sapiens
  misc_feature (61)..(62): /note="This region represents a CpG dinucleotide"
  misc_feature (61)..(61): /note="Nucleotide may be methylated to form 5-methylcytosine"
aggaaagagcggcctcctcaggcctcccgatccgtcttctgtgagacaactgcaggcaggcgtaggttacttattagctcctggtaggaagcacgtagaccaaggacatcaacagaacctgc

SEQ ID NO: 12360 - DNA, 122 bp, Homo sapiens
  misc_feature (61)..(62): /note="This region represents a CpG dinucleotide"
  misc_feature (61)..(61): /note="Nucleotide may be methylated to form 5-methylcytosine"
cttgcttggtgcaaggttctcacaaagcttcaatttgcaaagaccgtgatatctgccaaacgcaatacaatgaagtgtggctagtttgttacaacagccttaggaatcaaatccaaggtgat

SEQ ID NO: 12361 - DNA, 122 bp, Homo sapiens
  misc_feature (61)..(62): /note="This region represents a CpG dinucleotide"
  misc_feature (61)..(61): /note="Nucleotide may be methylated to form 5-methylcytosine"
ttcctggctatccagaagaacaagcctatcagcaagaaggaaatgattcagaggtccaaacggtaagaccaagaaaacaagagtacgtatacaagtgtaaaccaggccaccaagtggtcggg

SEQ ID NO: 12362 - DNA, 122 bp, Homo sapiens
  misc_feature (61)..(62): /note="This region represents a CpG dinucleotide"
  misc_feature (61)..(61): /note="Nucleotide may be methylated to form 5-methylcytosine"
agctcctccttgtacaaggacctcctgagcacccagcccagcccaggcatggtctccacacggtacagtagtgctgggtcctcagccgtgtgttcatacccctggggacagggtgccatagt

SEQ ID NO: 12363 - DNA, 122 bp, Homo sapiens
  misc_feature (61)..(62): /note="This region represents a CpG dinucleotide"
  misc_feature (61)..(61): /note="Nucleotide may be methylated to form 5-methylcytosine"
cccagagttggaggagtagttcatccggaagcatccgccaagtgatcaattttttggggacggtaggaatagaacaggtccgaggagttacttttctggaaaatcaggaagtactcattgcc

SEQ ID NO: 12364 - DNA, 122 bp, Homo sapiens
  misc_feature (61)..(62): /note="This region represents a CpG dinucleotide"
  misc_feature (61)..(61): /note="Nucleotide may be methylated to form 5-methylcytosine"
acttctctcccagtggctgttgtgagcagtttgcttgaactgaggaagtcctatctggggcgggaaggggaggagtgaagggagcagggatcactatggaggctgggcagggggtgggggca

SEQ ID NO: 12365 - DNA, 122 bp, Homo sapiens
  misc_feature (61)..(62): /note="This region represents a CpG dinucleotide"
  misc_feature (61)..(61): /note="Nucleotide may be methylated to form 5-methylcytosine"
gaggaaggaaactgaggtgcaagaaacttacccaatgacacacacagctgctagtggaagcgccaggatctgaattcatttggtcagattccagagccacttagctgctcttaacattctgc

SEQ ID NO: 12366 - DNA, 122 bp, Homo sapiens
  misc_feature (61)..(62): /note="This region represents a CpG dinucleotide"
  misc_feature (61)..(61): /note="Nucleotide may be methylated to form 5-methylcytosine"
tcacaaggcagcctcaggctgaaggtacaggtcttctgataagtccttttcaacaaaacacggtattgaagccaatggattgtagtctgaccagtcagtatgaatgatgaatgggtacccca

SEQ ID NO: 12367 - DNA, 122 bp, Homo sapiens
  misc_feature (61)..(62): /note="This region represents a CpG dinucleotide"
  misc_feature (61)..(61): /note="Nucleotide may be methylated to form 5-methylcytosine"
agaaaaggaacccaggatgggcagaaatgagggtaatgagaaatgggaacagagtgaggtcgggctagacatcttgtggagtgaactgaggccggtatctacccagggccactccctagatc

SEQ ID NO: 12368 - DNA, 122 bp, Homo sapiens
  misc_feature (61)..(62): /note="This region represents a CpG dinucleotide"
  misc_feature (61)..(61): /note="Nucleotide may be methylated to form 5-methylcytosine"
taaatggcattaggaaagctagttggcctcaccagcctcagtttcctggggataataatccgtgctcctcggaagctgttgagaagactgaatgagaggcctacatttgtagctcagaacct

SEQ ID NO: 12369 - DNA, 122 bp, Homo sapiens
  misc_feature (61)..(62): /note="This region represents a CpG dinucleotide"
  misc_feature (61)..(61): /note="Nucleotide may be methylated to form 5-methylcytosine"
agtaacatctctgtcctgcaggtggcaagaaacatgagtcacagatcacattaatgtattcggtgagtgagatatttcaaagttgggatttatttctaagacatagcactttaggattccaa

SEQ ID NO: 12370 - DNA, 122 bp, Homo sapiens
  misc_feature (61)..(62): /note="This region represents a CpG dinucleotide"
  misc_feature (61)..(61): /note="Nucleotide may be methylated to form 5-methylcytosine"
ttatgcatttaatcctcccaacagcccagaggcagatatattatctccattttgcagatacggagaaggcaaataactctcccagctagtcagtggtgaagctgagatttaaatccaagcag

SEQ ID NO: 12371 - DNA, 122 bp, Homo sapiens
  misc_feature (61)..(62): /note="This region represents a CpG dinucleotide"
  misc_feature (61)..(61): /note="Nucleotide may be methylated to form 5-methylcytosine"
tgctaggattacaggcgtgagccaccacgcccggcccaaaaaacccatatgtttagcatacgctaaaaacaccaactgaaccttctggagaaagtgggtcctgtggtgagctgaccacaggg

SEQ ID NO: 12372 - DNA, 122 bp, Homo sapiens
  misc_feature (61)..(62): /note="This region represents a CpG dinucleotide"
  misc_feature (61)..(61): /note="Nucleotide may be methylated to form 5-methylcytosine"
cactggaattttgtcagtcagcagattccagatgactaagatgatcaaattaagatgtcacgttcaactcatgtcctgcagtgtttcaccatcaacctctgggtttgaaacaagcagggagt

SEQ ID NO: 12373 - DNA, 122 bp, Homo sapiens
  misc_feature (61)..(62): /note="This region represents a CpG dinucleotide"
  misc_feature (61)..(61): /note="Nucleotide may be methylated to form 5-methylcytosine"
actgttcataaatatcctctcctttaatatccatggcatgactcaggtaggtactgtactcgccctcattcagctgacaaaggaaccgaggcacagagaaagtaagtaacctgcctaaaggc

SEQ ID NO: 12374 - DNA, 122 bp, Homo sapiens
  misc_feature (61)..(62): /note="This region represents a CpG dinucleotide"
  misc_feature (61)..(61): /note="Nucleotide may be methylated to form 5-methylcytosine"
cagactttaaagctgagctcgattctgctgactacttattttcagcattcaaagacacatcgtccatataacctactcatcattcaatcaagtatttccttgttcattaacttttcatgtgg

SEQ ID NO: 12375 - DNA, 122 bp, Homo sapiens
  misc_feature (61)..(62): /note="This region represents a CpG dinucleotide"
  misc_feature (61)..(61): /note="Nucleotide may be methylated to form 5-methylcytosine"
agaattcactgttaatagctcaatgccttttctgcagatgctgtggttacagctcctcaccgcttccttagaagctcttttgccccttctgataataaatgacctgactcttgtcttttctt

SEQ ID NO: 12376 - DNA, 122 bp, Homo sapiens
  misc_feature (61)..(62): /note="This region represents a CpG dinucleotide"
  misc_feature (61)..(61): /note="Nucleotide may be methylated to form 5-methylcytosine"
catttgtttgcacaggatttccaagacactttagacacataagctgccttgtaacgactccgctcaactgtaggtattgacatcactgtctttaggctaaaaacacaatgttggagaatgaa

SEQ ID NO: 12377 - DNA, 122 bp, Homo sapiens
  misc_feature (61)..(62): /note="This region represents a CpG dinucleotide"
  misc_feature (61)..(61): /note="Nucleotide may be methylated to form 5-methylcytosine"
ctctttttgtaagcagaggtggctggctctgcagccttaaggccattttttaagtcaccacgtctagaagtcacatgaactctgctcagcaataatctgttctcagaacagacttttcaacc

SEQ ID NO: 12378 - DNA, 122 bp, Homo sapiens
  misc_feature (61)..(62): /note="This region represents a CpG dinucleotide"
  misc_feature (61)..(61): /note="Nucleotide may be methylated to form 5-methylcytosine"
attcagcaaaacccagttccaggaatggtagtcacacacctttcctgctggatcttattccgtcaggtccaatccagccagttgtagatgatgattcatttttaccttttcctgtcagtctc

SEQ ID NO: 12379 - DNA, 122 bp, Homo sapiens
  misc_feature (61)..(62): /note="This region represents a CpG dinucleotide"
  misc_feature (61)..(61): /note="Nucleotide may be methylated to form 5-methylcytosine"
ggacttgcttcagggtgtcaacctgtaccaggctcaggctgcaaggccaggtagtgtcaccgtaaccctcacctggttgacacagggtctggacccaaggatttccttccaaccctgtaata

SEQ ID NO: 12380 - DNA, 122 bp, Homo sapiens
  misc_feature (61)..(62): /note="This region represents a CpG dinucleotide"
  misc_feature (61)..(61): /note="Nucleotide may be methylated to form 5-methylcytosine"
cttatgaaagttcccctccctgacttgagggcacaggatgtgataacacatcagtttctccggaagacccagtaattccacttctccttgaaacaaacctattctcatctagtaaaactagt

SEQ ID NO: 12381 - DNA, 122 bp, Homo sapiens
  misc_feature (61)..(62): /note="This region represents a CpG dinucleotide"
  misc_feature (61)..(61): /note="Nucleotide may be methylated to form 5-methylcytosine"
actcatttcatgagtgagtttccaaagcctgttctgacttgtcttcttatgattccacaacggctagggaaaccttcccaccttctccaagaagccaaggaagtttcaagacctataagtgc

SEQ ID NO: 12382 - DNA, 122 bp, Homo sapiens
  misc_feature (61)..(62): /note="This region represents a CpG dinucleotide"
  misc_feature (61)..(61): /note="Nucleotide may be methylated to form 5-methylcytosine"
cctgctactcaggaaacacacgcctatgctaatagactggagttcacaaggcctgggtctcgccctgctctgctctgcccaactgaagaacccaaatcaatggcttcatctctccagacagt

SEQ ID NO: 12383 - DNA, 122 bp, Homo sapiens
  misc_feature (61)..(62): /note="This region represents a CpG dinucleotide"
  misc_feature (61)..(61): /note="Nucleotide may be methylated to form 5-methylcytosine"
acaatctcacggtatcctgacaattactgttagtcatttcttacagtgctgcacaagacacgtctgtcattgttttgccagaggactgtgtgagataagatgctgagcattcccccacaagg

SEQ ID NO: 12384 - DNA, 122 bp, Homo sapiens
  misc_feature (61)..(62): /note="This region represents a CpG dinucleotide"
  misc_feature (61)..(61): /note="Nucleotide may be methylated to form 5-methylcytosine"
aactggtagttgctgacacatactttacacgaacatagtgtttatgtcagtccattctttcgtgagttttctgagtaatttcatggaacattgttggatcagcaatttgttctcccagcaat

SEQ ID NO: 12385 - DNA, 122 bp, Homo sapiens
  misc_feature (61)..(62): /note="This region represents a CpG dinucleotide"
  misc_feature (61)..(61): /note="Nucleotide may be methylated to form 5-methylcytosine"
ctgtgcaacctggaggtctgagggcagctgcagctttcatcagctccagcatcccattgacgtctgtgttgggtgactcagtattgagcagatcctgactgatataacatcattcttctaaa

SEQ ID NO: 12386 - DNA, 122 bp, Homo sapiens
  misc_feature (61)..(62): /note="This region represents a CpG dinucleotide"
  misc_feature (61)..(61): /note="Nucleotide may be methylated to form 5-methylcytosine"
catgagtcaccacacccagcctgctcttgctgttaactgtactgcctttctgaggcatcacgtctcacctctggtcaaccagtaaaagcccagggatagaaaatgagtaggacatatttaga

SEQ ID NO: 12387 - DNA, 122 bp, Homo sapiens
  misc_feature (61)..(62): /note="This region represents a CpG dinucleotide"
  misc_feature (61)..(61): /note="Nucleotide may be methylated to form 5-methylcytosine"
ctaatacctccttagtcacataacagctgttccctgggtctctcctatagtgctgtgacacgtttgtacccagcaaggaaatcatatccctcagtcatcattactttagttctaatcatttg

SEQ ID NO: 12388 - DNA, 122 bp, Homo sapiens
  misc_feature (61)..(62): /note="This region represents a CpG dinucleotide"
  misc_feature (61)..(61): /note="Nucleotide may be methylated to form 5-methylcytosine"
gctcactgaatgtggagtctctctgactcaccctgcacagcccaggaagccagattagggcggaaaaaggtattcagagtttgctgaggctagtggtggtcaggctgtgtgggaactctgga

SEQ ID NO: 12389 - DNA, 122 bp, Homo sapiens
  misc_feature (61)..(62): /note="This region represents a CpG dinucleotide"
  misc_feature (61)..(61): /note="Nucleotide may be methylated to form 5-methylcytosine"
aaacagtggcatcaatctaccctgtatgaattttcagttcatgcagcactgtggtactaccgaatgggtttgatgaaaagatgaagggacaagaaataataccagttaatctctaatgagca

SEQ ID NO: 12390 - DNA, 122 bp, Homo sapiens
  misc_feature (61)..(62): /note="This region represents a CpG dinucleotide"
  misc_feature (61)..(61): /note="Nucleotide may be methylated to form 5-methylcytosine"
tcgattttctgatggataaaggggtttctaatacccagctcacatggctgtggtgacaaacgggacagtggatttaaagcaggctatttggcccgtggcatatggtaggggcacaacccatt

SEQ ID NO: 12391 - DNA, 122 bp, Homo sapiens
  misc_feature (61)..(62): /note="This region represents a CpG dinucleotide"
  misc_feature (61)..(61): /note="Nucleotide may be methylated to form 5-methylcytosine"
tgggaacttaccacctgaagtgccctccaaattcatcttgggcagaagacctggactccacggagatcagcgagtaactgagcagctctcaaagacacaggctttatatagggtcaaggtga

SEQ ID NO: 12392 - DNA, 122 bp, Homo sapiens
  misc_feature (61)..(62): /note="This region represents a CpG dinucleotide"
  misc_feature (61)..(61): /note="Nucleotide may be methylated to form 5-methylcytosine"
gtacaaagtatgactatcaagggtacaagatgcaactaccaacttataggtatattaacacggcagaacagataacatttccaacaatactcaaaatggttttgccaccatttttaaaccgc

SEQ ID NO: 12393 - DNA, 122 bp, Homo sapiens
  misc_feature (61)..(62): /note="This region represents a CpG dinucleotide"
  misc_feature (61)..(61): /note="Nucleotide may be methylated to form 5-methylcytosine"
agcatttttattggtggagctgattctgagtcagtacctcatgctgtttaagagcagccacggccaggccagcagcagctgaaaggcatgggggctggctgtgatggcccagtcatcaggga

SEQ ID NO: 12394 - DNA, 122 bp, Homo sapiens
  misc_feature (61)..(62): /note="This region represents a CpG dinucleotide"
  misc_feature (61)..(61): /note="Nucleotide may be methylated to form 5-methylcytosine"
cctggttttgtttcatcttgacatgactggctgatataatccaccttttcacatagcctgcgtaggcacagcctaggccagttaggcaagcggatttccatttttgtaatgatgagactttt

SEQ ID NO: 12395 - DNA, 122 bp, Homo sapiens
  misc_feature (61)..(62): /note="This region represents a CpG dinucleotide"
  misc_feature (61)..(61): /note="Nucleotide may be methylated to form 5-methylcytosine"
agagggagagagactcagacagagagcatctctgtgagatgtgcttagggccctgaagggcgtgtgagcaggtgcctggacacctgaggggctgtgctgaggtctgccctgactcctccctg

SEQ ID NO: 12396 - DNA, 122 bp, Homo sapiens
  misc_feature (61)..(62): /note="This region represents a CpG dinucleotide"
  misc_feature (61)..(61): /note="Nucleotide may be methylated to form 5-methylcytosine"
ttcctggtcagaaagttcttcctcatgtcaaatctaaatccttcttgctctaaaatcttgcgtaacattaagccggtgtttctcttttgccttaaaaagcatttgagtttttacgctggatg

SEQ ID NO: 12397 - DNA, 122 bp, Homo sapiens
  misc_feature (61)..(62): /note="This region represents a CpG dinucleotide"
  misc_feature (61)..(61): /note="Nucleotide may be methylated to form 5-methylcytosine"
gaggttccctctctgatggctcatgatagggtgcagtcttgggtgtgcccagaatgttctcgactactagggaagagcatgattttagttccaagcctggcttcctaggagttgccctggtc

SEQ ID NO: 12398 - DNA, 122 bp, Homo sapiens
  misc_feature (61)..(62): /note="This region represents a CpG dinucleotide"
  misc_feature (61)..(61): /note="Nucleotide may be methylated to form 5-methylcytosine"
gtggctgctttgtccactagcatgccttaaatcagtatttgatgactaaatgaatgacagcgagagagcaagtaagcagaggagcaggaatcaacacagtccatacttccccacgttgccag

SEQ ID NO: 12399 - DNA, 122 bp, Homo sapiens
  misc_feature (61)..(62): /note="This region represents a CpG dinucleotide"
  misc_feature (61)..(61): /note="Nucleotide may be methylated to form 5-methylcytosine"
ggtactgagtgcacaagttactaggtgccaggctgtctcctaagcactttccatatgcttcgtcactcagtctcacagggattaggaggagatagtgatgatccccgtctgcatttctcttt

SEQ ID NO: 12400 - DNA, 122 bp, Homo sapiens
  misc_feature (61)..(62): /note="This region represents a CpG dinucleotide"
  misc_feature (61)..(61): /note="Nucleotide may be methylated to form 5-methylcytosine"
cttggcggccaaggaaaaagcctggcatgttagagctggtgcaggactctccagggtgaccgagccacccagaagagggaaaagccattctccataacaaaaagtcaggaccggctgaaagc

SEQ ID NO: 12401 - DNA, 122 bp, Homo sapiens
  misc_feature (61)..(62): /note="This region represents a CpG dinucleotide"
  misc_feature (61)..(61): /note="Nucleotide may be methylated to form 5-methylcytosine"
ctctctgtgggccatgtggacgagtttctgacctttgtgcctacctctgaccaaaaggtgcgtcccctccttccctgcctgagccacctctgcccttgtctgacctgatgggatgagtcagg

SEQ ID NO: 12402 - DNA, 122 bp, Homo sapiens
  misc_feature (61)..(62): /note="This region represents a CpG dinucleotide"
  misc_feature (61)..(61): /note="Nucleotide may be methylated to form 5-methylcytosine"
gtgattcccacctagtttagtggaaggaaatatcacccaaggactgcaatactataggtgcgtctgtgattagtcacggagcatatttgagtactgagacctaattgcaggcctaaggtcaa

SEQ ID NO: 12403 - DNA, 122 bp, Homo sapiens
  misc_feature (61)..(62): /note="This region represents a CpG dinucleotide"
  misc_feature (61)..(61): /note="Nucleotide may be methylated to form 5-methylcytosine"
ttgtccattctactgttgatggaaaatggactgtttccagctgcttgccatgatggatagcgcacttgtgaacattgtttcatgtgacctgatgtgcccaggagtggaattccagggaacct

SEQ ID NO: 12404 - DNA, 122 bp, Homo sapiens
  misc_feature (61)..(62): /note="This region represents a CpG dinucleotide"
  misc_feature (61)..(61): /note="Nucleotide may be methylated to form 5-methylcytosine"
cataatgatgccattatgacagatcagcccaaggctgcacactgacctaatcaacaggtgcggcagagctgtgattaagagactgagtcagttcccacttgtgaatagacagcatgaaggct

SEQ ID NO: 12405 - DNA, 122 bp, Homo sapiens
  misc_feature (61)..(62): /note="This region represents a CpG dinucleotide"
  misc_feature (61)..(61): /note="Nucleotide may be methylated to form 5-methylcytosine"
tattaacaagcaccagagctatgtcaaaggagaatcatccaaaacattgctgagccttgacgaagatgaacagcactcaggggaagaattctaggtggatctttgggtaataggaaccctga

SEQ ID NO: 12406 - DNA, 122 bp, Homo sapiens
  misc_feature (61)..(62): /note="This region represents a CpG dinucleotide"
  misc_feature (61)..(61): /note="Nucleotide may be methylated to form 5-methylcytosine"
ctcagacctgggtgtctggcaaggctggctttgagttccagcttcaccggtgactgactgcgtgtcagcagctcaggccctgcctttcagtctcctcatccatagaaaggaatgtaatgagt

SEQ ID NO: 12407 - DNA, 122 bp, Homo sapiens
  misc_feature (61)..(62): /note="This region represents a CpG dinucleotide"
  misc_feature (61)..(61): /note="Nucleotide may be methylated to form 5-methylcytosine"
aggcacaagccactgcgcccggtttgaggaaccactgactttgttgaggaacagaaagaacgcctgcacctttttacaatcccagcagcagtgtatgagtgtatcagtttctccatatcctt

SEQ ID NO: 12408 - DNA, 122 bp, Homo sapiens
  misc_feature (61)..(62): /note="This region represents a CpG dinucleotide"
  misc_feature (61)..(61): /note="Nucleotide may be methylated to form 5-methylcytosine"
agctttcctctgtggcaggccaactggtctgacccaaggttgtctgtggccatgttaggacgtatattcttactcgccgagcgacgcagcccagagggttcaggaaaaggaggtggtgagtg

SEQ ID NO: 12409 - DNA, 122 bp, Homo sapiens
  misc_feature (61)..(62): /note="This region represents a CpG dinucleotide"
  misc_feature (61)..(61): /note="Nucleotide may be methylated to form 5-methylcytosine"
ttcttcttccttgaattatgactaagaggaattttttccccatgaggttctttcactgctcgtgacttaggtaagaaagtggtcatcatctacgtgcatccttgaagaacatgggtgtgggt

SEQ ID NO: 12410 - DNA, 122 bp, Homo sapiens
  misc_feature (61)..(62): /note="This region represents a CpG dinucleotide"
  misc_feature (61)..(61): /note="Nucleotide may be methylated to form 5-methylcytosine"
cggaggtggctgccacctcccacgccaggcaaagggctgcctcggtggttctcccagccacggttccaccactgagccccagggaaggagacttctgacccagccacctcctgccccgctgc

SEQ ID NO: 12411 - DNA, 122 bp, Homo sapiens
  misc_feature (61)..(62): /note="This region represents a CpG dinucleotide"
  misc_feature (61)..(61): /note="Nucleotide may be methylated to form 5-methylcytosine"
gggattacaatgaagcgtgaggtctttttgaagtcatttggccggctctcttggttgtaacgagtctcagctggtttgactacaaaggcaacttcttgaagcagatcctgtttttttgtttt

SEQ ID NO: 12412 - DNA, 122 bp, Homo sapiens
  misc_feature (61)..(62): /note="This region represents a CpG dinucleotide"
  misc_feature (61)..(61): /note="Nucleotide may be methylated to form 5-methylcytosine"
aatgtcctgtacctgcttgacaccatgactcagtaagcaatctcaaatgaaaattaataccgtctatagtataatcttagttataagtaacagctgatcgtgtttagaaaatgaaaacctca

SEQ ID NO: 12413 - DNA, 122 bp, Homo sapiens
  misc_feature (61)..(62): /note="This region represents a CpG dinucleotide"
  misc_feature (61)..(61): /note="Nucleotide may be methylated to form 5-methylcytosine"
ggctgctcagtaaaaggagtaattgtgaaatagagctgttgtgaaataaagcataaggaacggtaaagaatgactaaaactgaaaagaggctgttgggtttcgaaattaagagatacttggt

SEQ ID NO: 12414 - DNA, 122 bp, Homo sapiens
  misc_feature (61)..(62): /note="This region represents a CpG dinucleotide"
  misc_feature (61)..(61): /note="Nucleotide may be methylated to form 5-methylcytosine"
agctcctaagaacagcttcaggcaagggaaggcaaagctgccaccaccagctccaaccagcggtgtcaaagccaaagacagacgtggctggggtatttactggcacccagcagagtgagaca

SEQ ID NO: 12415 - DNA, 122 bp, Homo sapiens
  misc_feature (61)..(62): /note="This region represents a CpG dinucleotide"
  misc_feature (61)..(61): /note="Nucleotide may be methylated to form 5-methylcytosine"
cccttgttatcagtccatcctctgtgctactgaatccatttttctaaaatgcagatttgacgtcatatctgtgcctaaaagtgctgagtggctccttttcaggatagaattgtaatctctca

SEQ ID NO: 12416 - DNA, 122 bp, Homo sapiens
  misc_feature (61)..(62): /note="This region represents a CpG dinucleotide"
  misc_feature (61)..(61): /note="Nucleotide may be methylated to form 5-methylcytosine"
ctgtcttagagacacagagagcagtgaccgaatgcacccgctgactcatcactgtgtcaccgcccaggctgaacctgttacacagagccgccttcaattctgctagataatctaggcctttc

SEQ ID NO: 12417 - DNA, 122 bp, Homo sapiens
  misc_feature (61)..(62): /note="This region represents a CpG dinucleotide"
  misc_feature (61)..(61): /note="Nucleotide may be methylated to form 5-methylcytosine"
gcttagtacaaggaagtggttagtttgctgtggaggagctaagcatgaagacggagacaacgagagacagagatcagccagacccatgctgtagaaagaagaggatcatgctgagatgttac

SEQ ID NO: 12418 - DNA, 122 bp, Homo sapiens
  misc_feature (61)..(62): /note="This region represents a CpG dinucleotide"
  misc_feature (61)..(61): /note="Nucleotide may be methylated to form 5-methylcytosine"
ggggtggaggtaacaagagtcagcctcggaggtcctgaggcctctcctgccgccccaccccggtacaccgaccgacctgcagctcccccactcggtttctccgcggtattcagaactctctc

SEQ ID NO: 12419 - DNA, 122 bp, Homo sapiens
  misc_feature (61)..(62): /note="This region represents a CpG dinucleotide"
  misc_feature (61)..(61): /note="Nucleotide may be methylated to form 5-methylcytosine"
gctattgaacaaagccttgaatgtgtttcagatattagcttatttaattcctcacagcaacgctgtgatggatagctgctcagagattgagtgacaggtggttagtgacagaatggaggttg

SEQ ID NO: 12420 - DNA, 122 bp, Homo sapiens
  misc_feature (61)..(62): /note="This region represents a CpG dinucleotide"
  misc_feature (61)..(61): /note="Nucleotide may be methylated to form 5-methylcytosine"
atttccgccacctcggcagcatgagtcaaaatggatcatcctccccgcctcaccgcttaacgaactgaggtgtgtgttggagctgaatgtttacaacacaaaaccaccaaccatcttgtttc

SEQ ID NO: 12421 - DNA, 122 bp, Homo sapiens
  misc_feature (61)..(62): /note="This region represents a CpG dinucleotide"
  misc_feature (61)..(61): /note="Nucleotide may be methylated to form 5-methylcytosine"
tcaggcatgagtcaccctgacaggccttatagtaatttctcgtttcatagtggagacttacgtgatgatatgagactgactttggctactcaataaatcaaagagcagagatggaatggaat

SEQ ID NO: 12422 - DNA, 122 bp, Homo sapiens
  misc_feature (61)..(62): /note="This region represents a CpG dinucleotide"
  misc_feature (61)..(61): /note="Nucleotide may be methylated to form 5-methylcytosine"
caggaaacatggagtgtgtcgcagggtgtgtcctctcttattcaaacctgaagctggtgccgtggtacacatgaggagactgaggctcagaagtggccgtgagtcggcacagcgtggcttgg

SEQ ID NO: 12423 - DNA, 122 bp, Homo sapiens
  misc_feature (61)..(62): /note="This region represents a CpG dinucleotide"
  misc_feature (61)..(61): /note="Nucleotide may be methylated to form 5-methylcytosine"
gccagtttcccaggtgaggctggtcctgcttcaagcgtgggagctccaaccactgctccacgctgcctccactcctgaacctgaaggtggaggagtttcccactgtctcaaataagcaccgg

SEQ ID NO: 12424 - DNA, 122 bp, Homo sapiens
  misc_feature (61)..(62): /note="This region represents a CpG dinucleotide"
  misc_feature (61)..(61): /note="Nucleotide may be methylated to form 5-methylcytosine"
aagccaagctcctcaccatgcctagcatgccctttgtgttctgggcctttgctctccttccgtcttatttcctgctgctcacatagcattgctgcagccatcatgaccctgtgggatcattg

SEQ ID NO: 12425 - DNA, 122 bp, Homo sapiens
  misc_feature (61)..(62): /note="This region represents a CpG dinucleotide"
  misc_feature (61)..(61): /note="Nucleotide may be methylated to form 5-methylcytosine"
agccctggtagagcactcactcgggggctccatcctgagccctggtgacctggatgaggccgtggaaactgcctgtcgactctcttagggctataaccccatccttctcttctgtatcagca

SEQ ID NO: 12426 - DNA, 122 bp, Homo sapiens
  misc_feature (61)..(62): /note="This region represents a CpG dinucleotide"
  misc_feature (61)..(61): /note="Nucleotide may be methylated to form 5-methylcytosine"
acactcacctcttccggagagctgttcccaattcaccaaccaaatcccgatgaggccccacgtctttggagttccagttccaagacacaggactcggccagtttgtgaagccttcgtgatgc

SEQ ID NO: 12427 - DNA, 122 bp, Homo sapiens
  misc_feature (61)..(62): /note="This region represents a CpG dinucleotide"
  misc_feature (61)..(61): /note="Nucleotide may be methylated to form 5-methylcytosine"
gatggatgagagttcccagacaagggtgaccttttctttcacctcgtccagctagacagacgtggtggttccaaggccccttgtcatctgctgattgctttgtgattaatgtacaagtcact

SEQ ID NO: 12428 - DNA, 122 bp, Homo sapiens
  misc_feature (61)..(62): /note="This region represents a CpG dinucleotide"
  misc_feature (61)..(61): /note="Nucleotide may be methylated to form 5-methylcytosine"
tagaaaagtagacagggatatattttataggcagagttgacaggacttaaggattaactacgagggagatgaagagtggtaaggaaaaaagattaagaacaatcctcagagattttgcttga

SEQ ID NO: 12429 - DNA, 122 bp, Homo sapiens
  misc_feature (61)..(62): /note="This region represents a CpG dinucleotide"
  misc_feature (61)..(61): /note="Nucleotide may be methylated to form 5-methylcytosine"
gtaggccacagaggcggcccaggcaggcagggtggagtagctggctgtgctatccgaggtcgctgtcctaatcagagcagggccgggagagccaggacaggaagtatggagagcagggagcg

SEQ ID NO: 12430 - DNA, 122 bp, Homo sapiens
  misc_feature (61)..(62): /note="This region represents a CpG dinucleotide"
  misc_feature (61)..(61): /note="Nucleotide may be methylated to form 5-methylcytosine"
tgggtgcccatgtgacttgtatacacccaggtcataatcagtttagcataatgccagatacgtacatagcgggcatccgataaaatgaaggaagaaaagtacaggggaggggaagggaaagt

SEQ ID NO: 12431 - DNA, 122 bp, Homo sapiens
  misc_feature (61)..(62): /note="This region represents a CpG dinucleotide"
  misc_feature (61)..(61): /note="Nucleotide may be methylated to form 5-methylcytosine"
tcgtgattggtgtgaaaatgaaacctgctccttccagaacaatgagaatgctacctctgccgacaacattcccatccaactaagatcaagccagattgctcttgagtcattggttagtaacc

SEQ ID NO: 12432 - DNA, 122 bp, Homo sapiens
  misc_feature (61)..(62): /note="This region represents a CpG dinucleotide"
  misc_feature (61)..(61): /note="Nucleotide may be methylated to form 5-methylcytosine"
gcatcaccatggagtgagattggaaagagctgggcccctgaaaccaaagcacagaatgtgcggctgtgccattatctaacaaatcccaggggatcaacaaagctccctgaaaaaagcatctg

SEQ ID NO: 12433 - DNA, 122 bp, Homo sapiens
  misc_feature (61)..(62): /note="This region represents a CpG dinucleotide"
  misc_feature (61)..(61): /note="Nucleotide may be methylated to form 5-methylcytosine"
caaactcttgacctcaggtgatctgtctgcctcgggctcccaaagtgctgggattacaggcgtgagccactgtgaccagccagcataatgtttttaaggtctatccgtgttgtagcatgaat

SEQ ID NO: 12434 - DNA, 122 bp, Homo sapiens
  misc_feature (61)..(62): /note="This region represents a CpG dinucleotide"
  misc_feature (61)..(61): /note="Nucleotide may be methylated to form 5-methylcytosine"
actagctgtgaccttgagcacattcactttcctgaacttcaagttttctcatctgtgagtcgcggttaataatacttacacagtggccctaaaaaatcagagaggaaaaaaaagtctatgca

SEQ ID NO: 12435 - DNA, 122 bp, Homo sapiens
  misc_feature (61)..(62): /note="This region represents a CpG dinucleotide"
  misc_feature (61)..(61): /note="Nucleotide may be methylated to form 5-methylcytosine"
cgggatgacagctctccccaggaatcctgctgcctgctgagaaacatggtcagcaagtcccgtgagtgtcatccgagggctcccccaccctggaggacaggcctcagaagccgtcttcagca

SEQ ID NO: 12436 - DNA, 122 bp, Homo sapiens
  misc_feature (61)..(62): /note="This region represents a CpG dinucleotide"
  misc_feature (61)..(61): /note="Nucleotide may be methylated to form 5-methylcytosine"
tccacactaagtctgggaagaagctcgcagagtcagcaggatcttcaaccctgtcaaggtcgggtgagtttcttgccttgagcagatctgtcagttctgtcacattgctgagatgcaattaa

SEQ ID NO: 12437 - DNA, 122 bp, Homo sapiens
  misc_feature (61)..(62): /note="This region represents a CpG dinucleotide"
  misc_feature (61)..(61): /note="Nucleotide may be methylated to form 5-methylcytosine"
caggacaagtgttcttaacctttttgaggtgttgggccttttcgagactctgatggaagccgtggaggaatgttctcagtgcgtcactcaaaatgatgcacacaacttcaacccaatttcag

SEQ ID NO: 12438 - DNA, 122 bp, Homo sapiens
  misc_feature (61)..(62): /note="This region represents a CpG dinucleotide"
  misc_feature (61)..(61): /note="Nucleotide may be methylated to form 5-methylcytosine"
cagttaaacccttctcaggcaccaccccatccaggaaaccactccccaagaggaagaacacgtggaacttcctgaaatgcgcctacatggtgatgacctacctcttcgtatcctacaacaaa

SEQ ID NO: 12439 - DNA, 122 bp, Homo sapiens
  misc_feature (61)..(62): /note="This region represents a CpG dinucleotide"
  misc_feature (61)..(61): /note="Nucleotide may be methylated to form 5-methylcytosine"
aaaccaacaatgactctggaatcaaagctggctaaggatttcttgccttaaagcaaggcacgtcattatttcatttgtacagtgaaagaggctggcaatgatctctaaagccctttccaagt

SEQ ID NO: 12440 - DNA, 122 bp, Homo sapiens
  misc_feature (61)..(62): /note="This region represents a CpG dinucleotide"
  misc_feature (61)..(61): /note="Nucleotide may be methylated to form 5-methylcytosine"
tgttcacacacgccaggctcgtcctcctaaccctaagtcctgtgcacagagccctgtagccgcccctacccagagcaggcactgacaagcccacccatttctagtgctgcccaaggtggact

SEQ ID NO: 12441 - DNA, 122 bp, Homo sapiens
  misc_feature (61)..(62): /note="This region represents a CpG dinucleotide"
  misc_feature (61)..(61): /note="Nucleotide may be methylated to form 5-methylcytosine"
acatgactcaaactggagaaagcaggaatcacttgtatcagccaagcactcaagagatgccggtaaacaggaaaagactgaagggtgctcagtaggtgactcttcactgatgtcctcctctt

SEQ ID NO: 12442 - DNA, 122 bp, Homo sapiens
  misc_feature (61)..(62): /note="This region represents a CpG dinucleotide"
  misc_feature (61)..(61): /note="Nucleotide may be methylated to form 5-methylcytosine"
atgatgcacacaaaatcctgagacaaagaccatctcaggcaagtcctgtagagcaggttgcgcacttccctgaaaagactagtcacagtcaattctcactccccaggagacccattgtagtt

SEQ ID NO: 12443 - DNA, 122 bp, Homo sapiens
  misc_feature (61)..(62): /note="This region represents a CpG dinucleotide"
  misc_feature (61)..(61): /note="Nucleotide may be methylated to form 5-methylcytosine"
atcagacacatctcatctctaaacctttccctgcagatcaccatctgagtcatgacttcccgtcgtttgtcttcagtgatctggttggtgcaaacgtatgaggtgactggaattccttagcc

SEQ ID NO: 12444 - DNA, 122 bp, Homo sapiens
  misc_feature (61)..(62): /note="This region represents a CpG dinucleotide"
  misc_feature (61)..(61): /note="Nucleotide may be methylated to form 5-methylcytosine"
agggctccgcccccaggtgagaatgttcccctctgagtctccagtgagaatgtctccatccggaaggaacacaaagcaagggataaacttgggtttcttgtatttctagtgggaggggagag

SEQ ID NO: 12445 - DNA, 122 bp, Homo sapiens
  misc_feature (61)..(62): /note="This region represents a CpG dinucleotide"
  misc_feature (61)..(61): /note="Nucleotide may be methylated to form 5-methylcytosine"
aaatccatactagatccatagataagtgcccctgggagatgaagtcacacaagccagtaacgtccaacagggacacaagttggcagacacggcaaatagcaggattcaaccctaagactgca

SEQ ID NO: 12446 - DNA, 122 bp, Homo sapiens
  misc_feature (61)..(62): /note="This region represents a CpG dinucleotide"
  misc_feature (61)..(61): /note="Nucleotide may be methylated to form 5-methylcytosine"
actccttaaaaatcgtgtcagatagggcttgttaaccttactttgtagaggaggaaccaacgacttggagttacgtaacttgcccaaggttaaggtggcacagattggactgtaaatctgtc

SEQ ID NO: 12447 - DNA, 122 bp, Homo sapiens
  misc_feature (61)..(62): /note="This region represents a CpG dinucleotide"
  misc_feature (61)..(61): /note="Nucleotide may be methylated to form 5-methylcytosine"
catgtcagttagcctagagttcacataggaagtggcttcaagaggtaattatttagctcacgaggggagtgagacatgactgctgtcacaccctgtcacactccaatgcctctctgggcctg

SEQ ID NO: 12448 - DNA, 122 bp, Homo sapiens
  misc_feature (61)..(62): /note="This region represents a CpG dinucleotide"
  misc_feature (61)..(61): /note="Nucleotide may be methylated to form 5-methylcytosine"
cttgtgtcttagataatatgcctgcccctaagcttagaattcagctacagacacaggttccggtgactcaataagaaagagatttaagacttcctttgattacccagttatccacttggtta

SEQ ID NO: 12449 - DNA, 122 bp, Homo sapiens
  misc_feature (61)..(62): /note="This region represents a CpG dinucleotide"
  misc_feature (61)..(61): /note="Nucleotide may be methylated to form 5-methylcytosine"
ataaaatggataaacaaaccatgatctattattcttccaatgggatactacagacttgaccgtactgagaatgaatgagcaacagccacatgtatgaatatggatgaatcaccaaagacata

SEQ ID NO: 12450 - DNA, 122 bp, Homo sapiens
  misc_feature (61)..(62): /note="This region represents a CpG dinucleotide"
  misc_feature (61)..(61): /note="Nucleotide may be methylated to form 5-methylcytosine"
aaccgtgttaaacaaaaaaagaggggttaatagctctgtgaagacatacatttagaggagcgcttgcagaaggaacatgggctttgccttcacacctaggtttaaatcccggatttgtgact

SEQ ID NO: 12451 - DNA, 122 bp, Homo sapiens
  misc_feature (61)..(62): /note="This region represents a CpG dinucleotide"
  misc_feature (61)..(61): /note="Nucleotide may be methylated to form 5-methylcytosine"
cacctgagtgggaagtaagagggtggagtcacaggcactcagctgggatttacctggcctcgtcactagactaatgggattgtggcacaggtgaacatcccgtcattggagaagaaaggctg

SEQ ID NO: 12452 - DNA, 122 bp, Homo sapiens
  misc_feature (61)..(62): /note="This region represents a CpG dinucleotide"
  misc_feature (61)..(61): /note="Nucleotide may be methylated to form 5-methylcytosine"
acctcaggtgatccacctgccttagcctcccaaagtgctgggattagaggcgtgagccaccgcacccgtcccagaacaaaggctttgagagtctgggactgtccacctggcagctgggcctg

SEQ ID NO: 12453 - DNA, 122 bp, Homo sapiens
  misc_feature (61)..(62): /note="This region represents a CpG dinucleotide"
  misc_feature (61)..(61): /note="Nucleotide may be methylated to form 5-methylcytosine"
tcaggtgattaaggaggatccttttcttcctccctttttatatggagcaggatcccagcccgtttgtaaaaaaatagaaggacacagaagggaaaacttgaaaatgaaaactgaaaaacaag

SEQ ID NO: 12454 - DNA, 122 bp, Homo sapiens
  misc_feature (61)..(62): /note="This region represents a CpG dinucleotide"
  misc_feature (61)..(61): /note="Nucleotide may be methylated to form 5-methylcytosine"
aactggaaggcatcacagtggcatagggtggagacacggtggcttcctgagtggcaccagcgcagagctgactcagaatgtaagccagtaaggcttgttaatggattctttacgaaagaaga

SEQ ID NO: 12455 - DNA, 122 bp, Homo sapiens
  misc_feature (61)..(62): /note="This region represents a CpG dinucleotide"
  misc_feature (61)..(61): /note="Nucleotide may be methylated to form 5-methylcytosine"
aggacacaccccatgttcctcactgctccattctcctgggtcctagcagtgaccgtcatgcgtgcctgttttgcatacctcccaaaccgaggtgtaacctgggcagcttctagacacactgc

SEQ ID NO: 12456 - DNA, 122 bp, Homo sapiens
  misc_feature (61)..(62): /note="This region represents a CpG dinucleotide"
  misc_feature (61)..(61): /note="Nucleotide may be methylated to form 5-methylcytosine"
aagctggctttaaacagtgaagaaagaaagcaattaaagtactaagcaaagggcttctagcgtccctgggacaagaataaatgaagttcattaaagacaggggtttagtcactgacttatta

SEQ ID NO: 12457 - DNA, 122 bp, Homo sapiens
  misc_feature (61)..(62): /note="This region represents a CpG dinucleotide"
  misc_feature (61)..(61): /note="Nucleotide may be methylated to form 5-methylcytosine"
cttccctcagctactgcatactattatctgtctactcgtaaatcccttcttattctctatcgtttctcacacattctcactttacttgttttccttaaacattagcttatttcttttatttt

SEQ ID NO: 12458 - DNA, 122 bp, Homo sapiens
  misc_feature (61)..(62): /note="This region represents a CpG dinucleotide"
  misc_feature (61)..(61): /note="Nucleotide may be methylated to form 5-methylcytosine"
ctgcaggagaatctagtgcacgtgtgccctccctcactgaaaccaaggcccagcacatcacgcatgagcaggatgtgcagttcctgcagctggtttcagaatgaatcctttgtttccattca

SEQ ID NO: 12459 - DNA, 122 bp, Homo sapiens
  misc_feature (61)..(62): /note="This region represents a CpG dinucleotide"
  misc_feature (61)..(61): /note="Nucleotide may be methylated to form 5-methylcytosine"
gtctctaattaagccggttgtcaatttgccaagcagtcagcaaaagtgcccataacttcacgcagtagaagatgagctcctgagttgaatgactgcctagctgttttcaggattattttaat

SEQ ID NO: 12460 - DNA, 122 bp, Homo sapiens
  misc_feature (61)..(62): /note="This region represents a CpG dinucleotide"
  misc_feature (61)..(61): /note="Nucleotide may be methylated to form 5-methylcytosine"
cttaccaagcctgttccttgagcactaacactgaagtaacaccttacaaaatttctgggccgggcatggtggctcatgcctataatcccagcactttaggaagccaagatgggtagatcgct

SEQ ID NO: 12461 - DNA, 122 bp, Homo sapiens
  misc_feature (61)..(62): /note="This region represents a CpG dinucleotide"
  misc_feature (61)..(61): /note="Nucleotide may be methylated to form 5-methylcytosine"
gacagcggaaagccagagctccctggaggatctggctgagaggcagaaaatggccctcagcgctctcggaacggtccttccagaagaactgatgaaatagctactacgccaggcacgtggca

SEQ ID NO: 12462 - DNA, 122 bp, Homo sapiens
  misc_feature (61)..(62): /note="This region represents a CpG dinucleotide"
  misc_feature (61)..(61): /note="Nucleotide may be methylated to form 5-methylcytosine"
gagcggggtggctggtgagagggtggtgtgcagcactgcgcttcctgagtgctgggctggcggcagcgtggcacccctgcccacaccaccttccgtctggggctaagctccagtgcctgacg

SEQ ID NO: 12463 - DNA, 122 bp, Homo sapiens
  misc_feature (61)..(62): /note="This region represents a CpG dinucleotide"
  misc_feature (61)..(61): /note="Nucleotide may be methylated to form 5-methylcytosine"
gctgcctcacaggaagcagggaataatgaaagatgaggcatttaaccttgtgtcctgcaacgctgttatactggcttattccagaagttttatattgattctatggaattttctatgtacat

SEQ ID NO: 12464 - DNA, 122 bp, Homo sapiens
  misc_feature (61)..(62): /note="This region represents a CpG dinucleotide"
  misc_feature (61)..(61): /note="Nucleotide may be methylated to form 5-methylcytosine"
ctggcacagcctgtgcccatatgtgaatagactttactgaaaggctctgcttcctccattcgtgactcagctttactcacactggctgtttcaaaagttgaagatgtacatcaatgcatgtt

SEQ ID NO: 12465 - DNA, 122 bp, Homo sapiens
  misc_feature (61)..(62): /note="This region represents a CpG dinucleotide"
  misc_feature (61)..(61): /note="Nucleotide may be methylated to form 5-methylcytosine"
ttccctcccttctactactcctcagatcccatgactgttccttccttccttccacaattacgtgtcaggcatggttctaaggaacaataatgggtaagagcaactatggacggtcccgccca

SEQ ID NO: 12466 - DNA, 122 bp, Homo sapiens
  misc_feature (61)..(62): /note="This region represents a CpG dinucleotide"
  misc_feature (61)..(61): /note="Nucleotide may be methylated to form 5-methylcytosine"
aagcagatgtaggtgacaaagtaaggatttcaggaggcttattggagagtaagccgtgaacgtgaaagggtgaggaagcgggattggacaagggaatcctttatgccaaaaagcagatatga

SEQ ID NO: 12467 - DNA, 122 bp, Homo sapiens
  misc_feature (61)..(62): /note="This region represents a CpG dinucleotide"
  misc_feature (61)..(61): /note="Nucleotide may be methylated to form 5-methylcytosine"
ttgtgtaccaaccttggaagaattaagaaaacaatcaatcaaagcattttcagggttctgcggttcagatgagtaacccaggttgagaaagaccgagatttactccattcaaaatgcccctc

SEQ ID NO: 12468 - DNA, 122 bp, Homo sapiens
  misc_feature (61)..(62): /note="This region represents a CpG dinucleotide"
  misc_feature (61)..(61): /note="Nucleotide may be methylated to form 5-methylcytosine"
cggtggggctcccaggtctgagaaggaggcatccagcactggcagctgctccagcacaggcgttcgcacctccagcaccgtccggccttgctgtgtcttcagggggagacaaggaagaaagt

SEQ ID NO: 12469 - DNA, 122 bp, Homo sapiens
  misc_feature (61)..(62): /note="This region represents a CpG dinucleotide"
  misc_feature (61)..(61): /note="Nucleotide may be methylated to form 5-methylcytosine"
tcatgtcctaatgcaatattataagacattgtaccacaacattccaatctaggctgctaacgcaatatgacatttctgtattatttgaatgcaattctaatacgacactctaaaataactaa

SEQ ID NO: 12470 - DNA, 122 bp, Homo sapiens
  misc_feature (61)..(62): /note="This region represents a CpG dinucleotide"
  misc_feature (61)..(61): /note="Nucleotide may be methylated to form 5-methylcytosine"
agaggttaagaacttgcctgaggccgtgtggctgggacagcctgcttagccacctaaatacgcaggaaacggcagctgttctcctccactagctctgagtggggccacaggaccactacgct

SEQ ID NO: 12471 - DNA, 122 bp, Homo sapiens
  misc_feature (61)..(62): /note="This region represents a CpG dinucleotide"
  misc_feature (61)..(61): /note="Nucleotide may be methylated to form 5-methylcytosine"
tgctgcccagaggaggagccattggccagcttggctctataatcaagaacagagagtctccgccaggcactgtggctcatacctgtaatcccagcactttgggaggccgaggcagatgaatc

SEQ ID NO: 12472 - DNA, 122 bp, Homo sapiens
  misc_feature (61)..(62): /note="This region represents a CpG dinucleotide"
  misc_feature (61)..(61): /note="Nucleotide may be methylated to form 5-methylcytosine"
ttgtctattttctctacctccaggtggaagccatgttgagttcatcacagaactactagccgggcctggcaccaaataggcatcagggaatgtcagtggaacttgactgcagaatctgatga

SEQ ID NO: 12473 - DNA, 122 bp, Homo sapiens
  misc_feature (61)..(62): /note="This region represents a CpG dinucleotide"
  misc_feature (61)..(61): /note="Nucleotide may be methylated to form 5-methylcytosine"
agtaacagatgaaaaatattcacagtactttcaacctcatctcaattaactgcatcactacgtaccatcaatacaaccatttggaaacctaggcattgtcactgatgacacatttgatccct

SEQ ID NO: 12474 - DNA, 122 bp, Homo sapiens
  misc_feature (61)..(62): /note="This region represents a CpG dinucleotide"
  misc_feature (61)..(61): /note="Nucleotide may be methylated to form 5-methylcytosine"
gccatctcaccattccatagactgcccaccctttggacccttgcatatacttcatgtggacgctaaagtcattttgacatggtatcatcagaactagtttgctgtgacaagagtgcatttga

SEQ ID NO: 12475 - DNA, 122 bp, Homo sapiens
  misc_feature (61)..(62): /note="This region represents a CpG dinucleotide"
  misc_feature (61)..(61): /note="Nucleotide may be methylated to form 5-methylcytosine"
atccccaaaagagtctaaatgagtcactgcaaacatgaacctccttccactaaggacaaacggaatgaagaaaagccagaaaagacagtatgtgaagagtggacgagaaatagggcaatctc

SEQ ID NO: 12476 - DNA, 122 bp, Homo sapiens
  misc_feature (61)..(62): /note="This region represents a CpG dinucleotide"
  misc_feature (61)..(61): /note="Nucleotide may be methylated to form 5-methylcytosine"
tttttctaatctgactctatcagttatgggaatgttccctcaattcttagtgctccaaaccggacttgctcttggcttgtatttgtccaaaatatttgtcttctctatgttttctacatgtt

SEQ ID NO: 12477 - DNA, 122 bp, Homo sapiens
  misc_feature (61)..(62): /note="This region represents a CpG dinucleotide"
  misc_feature (61)..(61): /note="Nucleotide may be methylated to form 5-methylcytosine"
tgtgatctggtatgcgttttcctctgcatgtcaaatgaataacaaggattaatttgcttccgccacaagatgcacaacattctctactcctccctctgctgtggctgctggaggccactcat

SEQ ID NO: 12478 - DNA, 122 bp, Homo sapiens
  misc_feature (61)..(62): /note="This region represents a CpG dinucleotide"
  misc_feature (61)..(61): /note="Nucleotide may be methylated to form 5-methylcytosine"
ccttgccagatccttatctgtcaaaactaagcccagatgtcaagttctctcagaggcctccgccagccagcacagtggctcatgcctatgatcccagtgctttgggaggctgaggcttgagg

SEQ ID NO: 12479 - DNA, 122 bp, Homo sapiens
  misc_feature (61)..(62): /note="This region represents a CpG dinucleotide"
  misc_feature (61)..(61): /note="Nucleotide may be methylated to form 5-methylcytosine"
gagctgcagtaagaactctggacatggctcaggtgagcttccctggctggcaatattctgcgtgtattggcacacattgatgccaagagaataacatgtccatgactccaccaaaagacaac

SEQ ID NO: 12480 - DNA, 122 bp, Homo sapiens
  misc_feature (61)..(62): /note="This region represents a CpG dinucleotide"
  misc_feature (61)..(61): /note="Nucleotide may be methylated to form 5-methylcytosine"
aataataaggttacctcgtgactgtaataattctggtatgaccatttctgtgatgccaagcggcgttttcaagagtcctattagaaatgtatttggcatcttgaatagcttgaacctattac

SEQ ID NO: 12481 - DNA, 122 bp, Homo sapiens
  misc_feature (61)..(62): /note="This region represents a CpG dinucleotide"
  misc_feature (61)..(61): /note="Nucleotide may be methylated to form 5-methylcytosine"
gttacatcagtacaatttcttgcatccttccctgaggccaagagagccccccagtctgtgcggaatggaatggaagagctcccttgtatacgttatttccttttgttttcacaagaccttgt

SEQ ID NO: 12482 - DNA, 122 bp, Homo sapiens
  misc_feature (61)..(62): /note="This region represents a CpG dinucleotide"
  misc_feature (61)..(61): /note="Nucleotide may be methylated to form 5-methylcytosine"
caaatgacttttctagcacacctcatttccttctgttaaaatttcacctttcgcctggcacggtggctcacacctataatcctagcactttgggaggctgaggcgggtggatcacctgaggt

SEQ ID NO: 12483 - DNA, 122 bp, Homo sapiens
  misc_feature (61)..(62): /note="This region represents a CpG dinucleotide"
  misc_feature (61)..(61): /note="Nucleotide may be methylated to form 5-methylcytosine"
ggtctacactggctggttgccgtctgcacttctgtactttagtcctgtggatgtgcagtccgtgttgtgggtcaagatcaagcactgggccaagacagaaaagccaagtcgctgtcttacgc

SEQ ID NO: 12484 - DNA, 122 bp, Homo sapiens
  misc_feature (61)..(62): /note="This region represents a CpG dinucleotide"
  misc_feature (61)..(61): /note="Nucleotide may be methylated to form 5-methylcytosine"
gtgtgtgagtggatcaacagccatttccacttatccaaagaccttgattgcaagaagatacgtgcttcaacaaaaacttggcagtggaagttttggaactgtctatctggtttcagacaaga

SEQ ID NO: 12485 - DNA, 122 bp, Homo sapiens
  misc_feature (61)..(62): /note="This region represents a CpG dinucleotide"
  misc_feature (61)..(61): /note="Nucleotide may be methylated to form 5-methylcytosine"
ggagagggcctggctctcttctcctgctgttcatcctgctttggctgcctggggacagcacgatacgaaaataaagtacaggaaaacccacttggaaaactgagcctggctgcctggcagct

SEQ ID NO: 12486 - DNA, 122 bp, Homo sapiens
  misc_feature (61)..(62): /note="This region represents a CpG dinucleotide"
  misc_feature (61)..(61): /note="Nucleotide may be methylated to form 5-methylcytosine"
ctgcagaggtatgaggtgtggcttgggatttcatcatcatgtctcagaccaaagagtaagcgaaaggtagaaccatggcagagtcagtgctccagcaaatgatgggcagttgttttttgctc

SEQ ID NO: 12487 - DNA, 122 bp, Homo sapiens
  misc_feature (61)..(62): /note="This region represents a CpG dinucleotide"
  misc_feature (61)..(61): /note="Nucleotide may be methylated to form 5-methylcytosine"
tatgggatattttataagaggattggcaggttctgtgaccgcagattcttcctgctcaaccgcagattctacaggtgcatcctgtagacactttacaggcgaagttacagggaagaggattt

SEQ ID NO: 12488 - DNA, 122 bp, Homo sapiens
  misc_feature (61)..(62): /note="This region represents a CpG dinucleotide"
  misc_feature (61)..(61): /note="Nucleotide may be methylated to form 5-methylcytosine"
tttgagcctggaagagaaatgacagtgattccctcagagaaatgacaaagctcatctgtgcggagcctgtgagatgaagcttgtgattaaggcctattgccaattgcatcagagcctgattc

SEQ ID NO: 12489 - DNA, 122 bp, Homo sapiens
  misc_feature (61)..(62): /note="This region represents a CpG dinucleotide"
  misc_feature (61)..(61): /note="Nucleotide may be methylated to form 5-methylcytosine"
gactcaagaaaccctcttttcttgctcccactacatagctggggtaacttgagttttcagcgttttacagcagggatccccagactgcatatgttcgtctgagatcactaggcacatccatt

SEQ ID NO: 12490 - DNA, 122 bp, Homo sapiens
  misc_feature (61)..(62): /note="This region represents a CpG dinucleotide"
  misc_feature (61)..(61): /note="Nucleotide may be methylated to form 5-methylcytosine"
ttgcggttacatcactccaatctccgcctccatgagcacactgcttcctccttttctgcgcgtcgtcttctctgtaatgggtctacttgtcccttacaaagacacttgtcacttgattttga

SEQ ID NO: 12491 - DNA, 122 bp, Homo sapiens
  misc_feature (61)..(62): /note="This region represents a CpG dinucleotide"
  misc_feature (61)..(61): /note="Nucleotide may be methylated to form 5-methylcytosine"
ccaccagaaaacagctctcatctcctcatatctagttctttacagatgccacttattacacgtttgtgaatattaacattatatccagttcagcaagttttatcagacacctgtattacagg

SEQ ID NO: 12492 - DNA, 122 bp, Homo sapiens
  misc_feature (61)..(62): /note="This region represents a CpG dinucleotide"
  misc_feature (61)..(61): /note="Nucleotide may be methylated to form 5-methylcytosine"
tttttgaaccagtttcccaggagattcatgtgcggtgcgtttaggatccaaggggctggacggctttcacagtccagcttagagtgatctggttctgacaggacagagctgtctgaacaatg

SEQ ID NO: 12493 - DNA, 122 bp, Homo sapiens
  misc_feature (61)..(62): /note="This region represents a CpG dinucleotide"
  misc_feature (61)..(61): /note="Nucleotide may be methylated to form 5-methylcytosine"
ccccaaaggccccaggtctggctggctgggctgcaggataaccctgacaccaaaatggaacggaaaggtctggaagtcactgctctgtccacagccctggcaccactcctggggaggcttca

SEQ ID NO: 12494 - DNA, 122 bp, Homo sapiens
  misc_feature (61)..(62): /note="This region represents a CpG dinucleotide"
  misc_feature (61)..(61): /note="Nucleotide may be methylated to form 5-methylcytosine"
gttcttcaagtcttatcttttattgtagcacaaaaccttttggcctccgttatgcaaattcgagataccagtcatttgaggaagaagtagagaagggagggaaaacagggtcatcttcccca

SEQ ID NO: 12495 - DNA, 122 bp, Homo sapiens
  misc_feature (61)..(62): /note="This region represents a CpG dinucleotide"
  misc_feature (61)..(61): /note="Nucleotide may be methylated to form 5-methylcytosine"
tttgaagtcagctgcttagtaaccttaattgcatctgaaaatccctcacagcagtagatccgtgtttgactgaataggggataaggttcttggggaacatttaaaagttaatcctatcacag

SEQ ID NO: 12496 - DNA, 122 bp, Homo sapiens
  misc_feature (61)..(62): /note="This region represents a CpG dinucleotide"
  misc_feature (61)..(61): /note="Nucleotide may be methylated to form 5-methylcytosine"
ctaacttcctgtgactgggctttcagatgttgatgttgatgatgtccctgccaggataaccggtccagattggccagctgtgagaataattcaagtgggtttcaggtaaatcactttctgat

SEQ ID NO: 12497 - DNA, 122 bp, Homo sapiens
  misc_feature (61)..(62): /note="This region represents a CpG dinucleotide"
  misc_feature (61)..(61): /note="Nucleotide may be methylated to form 5-methylcytosine"
ctcataagccttgcccctgtgagtttcaggccgtcttctcaaatagacttacccacccatcgtaaacaaactgcatcatgcgaactcattccttccaggcattactaattctctacaagtcc

SEQ ID NO: 12498 - DNA, 122 bp, Homo sapiens
  misc_feature (61)..(62): /note="This region represents a CpG dinucleotide"
  misc_feature (61)..(61): /note="Nucleotide may be methylated to form 5-methylcytosine"
catctcctactgccctccctctccctctctgctcttgcaatagctggaataggccaggcgcgcttcatgctcaggaccttgaatgctttgtgccttgatattgccttgccacacttcccagc

SEQ ID NO: 12499 - DNA, 122 bp, Homo sapiens
  misc_feature (61)..(62): /note="This region represents a CpG dinucleotide"
  misc_feature (61)..(61): /note="Nucleotide may be methylated to form 5-methylcytosine"
aataggaattgagtttgcaaggttgaggctggagatgaaaaactagagaaagcgtaactacgatagctgaagagacaagaagaattgccaaaggatagtgaaataataataatattcggcta

SEQ ID NO: 12500 - DNA, 122 bp, Homo sapiens
  misc_feature (61)..(62): /note="This region represents a CpG dinucleotide"
  misc_feature (61)..(61): /note="Nucleotide may be methylated to form 5-methylcytosine"
caaggcagtgtcatattaattctcagttaaccctcctaagtagcctaacaagttaggtggcgtagagattattatctccattttacaaataagaaaactgaggctcagagactagaagcgat

SEQ ID NO: 12501 - DNA, 122 bp, Homo sapiens
  misc_feature (61)..(62): /note="This region represents a CpG dinucleotide"
  misc_feature (61)..(61): /note="Nucleotide may be methylated to form 5-methylcytosine"
atcttgcaggcctcgcggcgtcgttcttcgttgtggcggcctgtggctctttgaaaaacacgacgaggcctgcaaaatgcgtttttctttttttcctttacgcatgtaaccacggtcctgca

SEQ ID NO: 12502 - DNA, 122 bp, Homo sapiens
  misc_feature (61)..(62): /note="This region represents a CpG dinucleotide"
  misc_feature (61)..(61): /note="Nucleotide may be methylated to form 5-methylcytosine"
gactacagccaacaataaatattaatactataaagtaaggtcctaaggactccacagttacggaggaataagggatcagaagttcatatccattatttggaagcattaagaaatgtttagat

SEQ ID NO: 12503 - DNA, 122 bp, Homo sapiens
  misc_feature (61)..(62): /note="This region represents a CpG dinucleotide"
  misc_feature (61)..(61): /note="Nucleotide may be methylated to form 5-methylcytosine"
cctttgttctatgacaggcaagtcagcaggatgtcaggcctggcttgatcttacacccctcgactgaatgcccgggagtccctgagcgttggggcaggaggagccttagagactgtaaggac

SEQ ID NO: 12504 - DNA, 122 bp, Homo sapiens
  misc_feature (61)..(62): /note="This region represents a CpG dinucleotide"
  misc_feature (61)..(61): /note="Nucleotide may be methylated to form 5-methylcytosine"
gggattacaggtgtgagccaccacacccagcctactcctactcttgtacttgacgccagacgggccctgacaaggtgacacacactccaagattggaaacagccatcaggagccggatgggc

SEQ ID NO: 12505 - DNA, 122 bp, Homo sapiens
  misc_feature (61)..(62): /note="This region represents a CpG dinucleotide"
  misc_feature (61)..(61): /note="Nucleotide may be methylated to form 5-methylcytosine"
agaacaggaagtctcaacggaaaatgaggtcagcctggtggctgagaggaaaagggtcagcgagcacagccttctgcccccgtgggtccccacagcggccagcccagggccctgcatgcagc

SEQ ID NO: 12506 - DNA, 122 bp, Homo sapiens
  misc_feature (61)..(62): /note="This region represents a CpG dinucleotide"
  misc_feature (61)..(61): /note="Nucleotide may be methylated to form 5-methylcytosine"
tctgggatggggctaggatgctttgatagtgaatcggtatcttccctgggcctcagcttacgtcaaacactccatcggcagagaggggcgtgggggagggggagaggtggggttgtccagag

SEQ ID NO: 12507 - DNA, 122 bp, Homo sapiens
  misc_feature (61)..(62): /note="This region represents a CpG dinucleotide"
  misc_feature (61)..(61): /note="Nucleotide may be methylated to form 5-methylcytosine"
tacaggcgtgagccaccgcgcccggcctgaactagcagcattttaagtgctcagtggcaacgtggtaggtggccaccatgctgtgcagtacaggtagactctcatgtctagatccacttgct

SEQ ID NO: 12508 - DNA, 122 bp, Homo sapiens
  misc_feature (61)..(62): /note="This region represents a CpG dinucleotide"
  misc_feature (61)..(61): /note="Nucleotide may be methylated to form 5-methylcytosine"
caaattaatactccgtatgccatcttaccatacatttcttgtctctgcaatgaggctgagcgagactgtcccaaatgtgtttttatcctgagtctgaggcaggctgaactttaatctgcatg

SEQ ID NO: 12509 - DNA, 122 bp, Homo sapiens
  misc_feature (61)..(62): /note="This region represents a CpG dinucleotide"
  misc_feature (61)..(61): /note="Nucleotide may be methylated to form 5-methylcytosine"
cttcttttgggacatcatccctcccatcccacgtaatcccagggagcttgccagtcaagacgccttgccacagtgggtggcacatggccaggtctcccgtagtgctctatacaccagccagt

SEQ ID NO: 12510 - DNA, 122 bp, Homo sapiens
  misc_feature (61)..(62): /note="This region represents a CpG dinucleotide"
  misc_feature (61)..(61): /note="Nucleotide may be methylated to form 5-methylcytosine"
ggcctgggttgtctgatgcacctctgagtcaggtctcagggacaaacctttcaacctgtgcgcttcagtgcagcctcctacaaaagggaatcccagaacataaccatatctctgaataaggt

SEQ ID NO: 12511 - DNA, 122 bp, Homo sapiens
  misc_feature (61)..(62): /note="This region represents a CpG dinucleotide"
  misc_feature (61)..(61): /note="Nucleotide may be methylated to form 5-methylcytosine"
gtgaggctcatgatcccattgttgggctaaacactaagagtggtcattaaataaattatacggatttccaaagaggcgtttacaaaacagaacacagggtggttcctgtagaggaatttcaa

SEQ ID NO: 12512 - DNA, 122 bp, Homo sapiens
  misc_feature (61)..(62): /note="This region represents a CpG dinucleotide"
  misc_feature (61)..(61): /note="Nucleotide may be methylated to form 5-methylcytosine"
ctgtcatcatagattagttttgcctgttcttcaacttcatatacatttgaccatatggcacgttctcttttggtcctggcttcttttagtcaacatgtctgcgggattcatctgtgttactg

SEQ ID NO: 12513 - DNA, 122 bp, Homo sapiens
  misc_feature (61)..(62): /note="This region represents a CpG dinucleotide"
  misc_feature (61)..(61): /note="Nucleotide may be methylated to form 5-methylcytosine"
agtaactagaaaacgattcatctgtgtccatttgccagtggttcttcaacttcctttcagcgtctcaatgcatcataagctgttagtcctgacagaggctttagtgattagtccaatccctt

SEQ ID NO: 12514 - DNA, 122 bp, Homo sapiens
  misc_feature (61)..(62): /note="This region represents a CpG dinucleotide"
  misc_feature (61)..(61): /note="Nucleotide may be methylated to form 5-methylcytosine"
tatgatttttctaagtttcagtggctgcacacccttatcccacataagattagattttcacgcagacattgggcaagagtcccaggcctcacagatattcttgggtcaaccaggaactctcc

SEQ ID NO: 12515 - DNA, 122 bp, Homo sapiens
  misc_feature (61)..(62): /note="This region represents a CpG dinucleotide"
  misc_feature (61)..(61): /note="Nucleotide may be methylated to form 5-methylcytosine"
aaatgaatctgcaccgaatgtctttttatagccaggttttgaagggtgagtaaacgcacacgctcacacatgtgcatacaagggccaacacccggcacatggaagggtctggaaaacccact

SEQ ID NO: 12516 - DNA, 122 bp, Homo sapiens
  misc_feature (61)..(62): /note="This region represents a CpG dinucleotide"
  misc_feature (61)..(61): /note="Nucleotide may be methylated to form 5-methylcytosine"
cttttgctcttgcaacgttctctacagtcctgttaatttccaggccagctcttcccccaccggccccgcaagccttcagggtgcctcccgctccgtggcccaccccgctgcctgcctccttc

SEQ ID NO: 12517 - DNA, 122 bp, Homo sapiens
  misc_feature (61)..(62): /note="This region represents a CpG dinucleotide"
  misc_feature (61)..(61): /note="Nucleotide may be methylated to form 5-methylcytosine"
aagcagtccttctggagggtttctacttcttccaataaccacagtgaaactaaaacatttcgaaatcctcctttgaaatttcctttaaagtctatttacaggccaggcgcagtgactctcat

SEQ ID NO: 12518 - DNA, 122 bp, Homo sapiens
  misc_feature (61)..(62): /note="This region represents a CpG dinucleotide"
  misc_feature (61)..(61): /note="Nucleotide may be methylated to form 5-methylcytosine"
ggaaatgtatagattaatgaagcaacctatgactctctgtgccagacttttcaccattgccgtactcttctctttcacaccctatgcctacgtttaacatgatgttcccggtgcctgggatg

SEQ ID NO: 12519 - DNA, 122 bp, Homo sapiens
  misc_feature (61)..(62): /note="This region represents a CpG dinucleotide"
  misc_feature (61)..(61): /note="Nucleotide may be methylated to form 5-methylcytosine"
actgtggataaaatgtaactcacttgaatcagagcttccatatggtaaaagattatagtgcgtagccttctgcattttattaagtagtcaaggtgagaaggttatttaggcatttgagtatt

SEQ ID NO: 12520 - DNA, 122 bp, Homo sapiens
  misc_feature (61)..(62): /note="This region represents a CpG dinucleotide"
  misc_feature (61)..(61): /note="Nucleotide may be methylated to form 5-methylcytosine"
atttgaattacagtgaggtactcacagcaggattatcactagactataggaaaagcttcacgctacagactatggtggctttcttgggcctctcttcccacccaggcccaactgacactcct

SEQ ID NO: 12521 - DNA, 122 bp, Homo sapiens
  misc_feature (61)..(62): /note="This region represents a CpG dinucleotide"
  misc_feature (61)..(61): /note="Nucleotide may be methylated to form 5-methylcytosine"
agattctagagaagcaggaaccagaaagtcacttcaaatgtaaaccacaaagttaataatcgcaaaggcaaaagctcaaattgcatatggtgattcataatcaacctgcttcacctatggca

SEQ ID NO: 12522 - DNA, 122 bp, Homo sapiens
  misc_feature (61)..(62): /note="This region represents a CpG dinucleotide"
  misc_feature (61)..(61): /note="Nucleotide may be methylated to form 5-methylcytosine"
acccttgaaccacaccacatggcctgcccagaatctgtgaacaggctgactggtgaagggcgttccctgacaaagccagtctgtaaatactggattaagtccctgcttcttcaaagtgcaca

SEQ ID NO: 12523 - DNA, 122 bp, Homo sapiens
  misc_feature (61)..(62): /note="This region represents a CpG dinucleotide"
  misc_feature (61)..(61): /note="Nucleotide may be methylated to form 5-methylcytosine"
tagttcttcactcctaagcctcatccttttctatattgtaaggcttctacaattacaattcgtccacttttataattgatatgtacacttgagcaataattctcaattcccaacccataacc

SEQ ID NO: 12524 - DNA, 122 bp, Homo sapiens
  misc_feature (61)..(62): /note="This region represents a CpG dinucleotide"
  misc_feature (61)..(61): /note="Nucleotide may be methylated to form 5-methylcytosine"
cttctgaggtcagagaatatacaaagcaagtctagaagctgctgtgactatgagcgtcaacggtgaaatcttaggcatctacttcatgccagacttgttccacatgctttatctcagttaat

SEQ ID NO: 12525 - DNA, 122 bp, Homo sapiens
  misc_feature (61)..(62): /note="This region represents a CpG dinucleotide"
  misc_feature (61)..(61): /note="Nucleotide may be methylated to form 5-methylcytosine"
tacatttccacttgttaaactgaaaactggcccgagaaagcttctgtactgccatccttgcgtccttgcagatgaatcgtaacctagcatagtaggtaggcagactgaaaacctaacttagc

SEQ ID NO: 12526 - DNA, 122 bp, Homo sapiens
  misc_feature (61)..(62): /note="This region represents a CpG dinucleotide"
  misc_feature (61)..(61): /note="Nucleotide may be methylated to form 5-methylcytosine"
agcctccagtttaacttggaggactgagtcacccctgtaataacatgtttgtctgaaccacgcacaggacatcctttgccattcaacctctgatttgcacaaggtgactaaaggaccagcag

SEQ ID NO: 12527 - DNA, 122 bp, Homo sapiens
  misc_feature (61)..(62): /note="This region represents a CpG dinucleotide"
  misc_feature (61)..(61): /note="Nucleotide may be methylated to form 5-methylcytosine"
gaactgaggccagtagctcaacttctctgaggccaggccagggtgagtgtggcagtctgtcgcagtgactgtggtgagctcctctggatgagcaactaacagggcccaacaagaacctgcca

SEQ ID NO: 12528 - DNA, 122 bp, Homo sapiens
  misc_feature (61)..(62): /note="This region represents a CpG dinucleotide"
  misc_feature (61)..(61): /note="Nucleotide may be methylated to form 5-methylcytosine"
atttcagtctccttccgttcccaggtcaataaacaataggcttttccaatcttttcatgccgccaatttctggccttctctcagagccccactcctcgtggtattgtgggtttcagggtgta

SEQ ID NO: 12529 - DNA, 122 bp, Homo sapiens
  misc_feature (61)..(62): /note="This region represents a CpG dinucleotide"
  misc_feature (61)..(61): /note="Nucleotide may be methylated to form 5-methylcytosine"
ttcaacaaagccttggggaatgaatcaccccggagtgtaagatggtgacatcctgggaagcggagatttgattggcatactgcttgatggttttctgagttcatctgaatcgagttcttact

SEQ ID NO: 12530 - DNA, 122 bp, Homo sapiens
  misc_feature (61)..(62): /note="This region represents a CpG dinucleotide"
  misc_feature (61)..(61): /note="Nucleotide may be methylated to form 5-methylcytosine"
atgcctcacccctccagggcctcaggagtgaacttttagctcccagtgtggcagctaaagcgctccacaatatgacacagatcctctcctttcacccttacttctctttattttcctatgca

SEQ ID NO: 12531 - DNA, 122 bp, Homo sapiens
  misc_feature (61)..(62): /note="This region represents a CpG dinucleotide"
  misc_feature (61)..(61): /note="Nucleotide may be methylated to form 5-methylcytosine"
actacgtccgagacagcgattttggggagcacacagggaggggacttcatctgggaggaacgcattattaggctgctgtgacaggtgtgtgggcgtggaccatctctgtacctttgtatatg

SEQ ID NO: 12532 - DNA, 122 bp, Homo sapiens
  misc_feature (61)..(62): /note="This region represents a CpG dinucleotide"
  misc_feature (61)..(61): /note="Nucleotide may be methylated to form 5-methylcytosine"
atgtgggtggggacgagccagaggagaaggtagttacctctgaaaacgaggcaggaaaggcggttcttgaacaactggtaggtcaagaagtaccacctgctgaagagtcaccagaggtgaca

SEQ ID NO: 12533 - DNA, 122 bp, Homo sapiens
  misc_feature (61)..(62): /note="This region represents a CpG dinucleotide"
  misc_feature (61)..(61): /note="Nucleotide may be methylated to form 5-methylcytosine"
ttcttatttgttcattagaaatgttcagtctcttccctttgagggaataacaaggggtagcggagtggagaagacctgagttatgaaccagggcacctgtctcagccattattcagcttatt

SEQ ID NO: 12534 - DNA, 122 bp, Homo sapiens
  misc_feature (61)..(62): /note="This region represents a CpG dinucleotide"
  misc_feature (61)..(61): /note="Nucleotide may be methylated to form 5-methylcytosine"
acaggaagcaagtgcctcctcatacaggaagcactggcattaggaacaccctgtatttctcgcctgcagctgcactgtgtcactcactgatgtcattctcctatctgaagggctcagggtcc

SEQ ID NO: 12535 - DNA, 122 bp, Homo sapiens
  misc_feature (61)..(62): /note="This region represents a CpG dinucleotide"
  misc_feature (61)..(61): /note="Nucleotide may be methylated to form 5-methylcytosine"
cttgaaagacagcagtaaatagaaatcctcccaacaggcagagcctcaggtggtatacctcgccagctacttcatgtggaaaaggaagtggcctgcagtaagaatacaagtgggtttataga

SEQ ID NO: 12536 - DNA, 122 bp, Homo sapiens
  misc_feature (61)..(62): /note="This region represents a CpG dinucleotide"
  misc_feature (61)..(61): /note="Nucleotide may be methylated to form 5-methylcytosine"
actttctgtttcagcattcacagaagtgaggctattaacttccagcttcgtgcgatggctcgtccaaaactactactccttatttgggagtcctcctggaatcactagggggcagtataaat

SEQ ID NO: 12537 - DNA, 122 bp, Homo sapiens
  misc_feature (61)..(62): /note="This region represents a CpG dinucleotide"
  misc_feature (61)..(61): /note="Nucleotide may be methylated to form 5-methylcytosine"
gctggcatcttcacagctccttcctcccaccccaggacaagggcccctggaacactggcccgcagccacaataagggtgtccatggattcctaggactacaagtggtggaaggcagcccctt

SEQ ID NO: 12538 - DNA, 122 bp, Homo sapiens
  misc_feature (61)..(62): /note="This region represents a CpG dinucleotide"
  misc_feature (61)..(61): /note="Nucleotide may be methylated to form 5-methylcytosine"
tatgagtaagtaaaaacaaataagcacagctgccagttatcctgttcaacagatgtacagcgtgcaaagctgaccacagccaggtcctccttccagaaattaattccccataaaatgtcagc

SEQ ID NO: 12539 - DNA, 122 bp, Homo sapiens
  misc_feature (61)..(62): /note="This region represents a CpG dinucleotide"
  misc_feature (61)..(61): /note="Nucleotide may be methylated to form 5-methylcytosine"
gtttcctcatttgtaaaacaaggacaatgtgatctctagctcacaggattaaatgaaatacgtaagcaaactgccagcccagtgcttcatgtggaagtttcataggagtttccattttgcaa

SEQ ID NO: 12540 - DNA, 122 bp, Homo sapiens
  misc_feature (61)..(62): /note="This region represents a CpG dinucleotide"
  misc_feature (61)..(61): /note="Nucleotide may be methylated to form 5-methylcytosine"
gacccagaaaccaaactagacagtgaaatcagtagtgaaggcccccccctccaagctgtacgcaagttggaagggacaaaccactaagttacaaataaggaaacaggcttggaaagtctgag

SEQ ID NO: 12541 - DNA, 122 bp, Homo sapiens
  misc_feature (61)..(62): /note="This region represents a CpG dinucleotide"
  misc_feature (61)..(61): /note="Nucleotide may be methylated to form 5-methylcytosine"
tgtgaatctatagtaaacttaaaatacacctgccatgagagaaggagagagaaacaagggcgatgatgtttaccataaagaattgctgtaaggattaaacgtgatgacttacaatggaagcc

SEQ ID NO: 12542 - DNA, 122 bp, Homo sapiens
  misc_feature (61)..(62): /note="This region represents a CpG dinucleotide"
  misc_feature (61)..(61): /note="Nucleotide may be methylated to form 5-methylcytosine"
ttgagggaagtacaaagcttaaccgtagacaggaacctggaaatgctgggtcagcctcttcgtctacccgtacatgacatacaaaattattccatgttacttcaatacttttacccagagcc

SEQ ID NO: 12543 - DNA, 122 bp, Homo sapiens
  misc_feature (61)..(62): /note="This region represents a CpG dinucleotide"
  misc_feature (61)..(61): /note="Nucleotide may be methylated to form 5-methylcytosine"
ttcctcaggaaaacatgcagggttcctcacagctgcttgagccaggctctgtccttccttcgcagattgccccgtggctgcctgcctcttcactctcctaaagctttttggctttaccttcc

SEQ ID NO: 12544 - DNA, 122 bp, Homo sapiens
  misc_feature (61)..(62): /note="This region represents a CpG dinucleotide"
  misc_feature (61)..(61): /note="Nucleotide may be methylated to form 5-methylcytosine"
ggcagggatgtcattcacttctgtgactcagtgctctgaatcaggcccagtgaagactgacgtgcagcctgtattggcagaatgaatgaataaatactacacacgcatattttgaattgaaa

SEQ ID NO: 12545 - DNA, 122 bp, Homo sapiens
  misc_feature (61)..(62): /note="This region represents a CpG dinucleotide"
  misc_feature (61)..(61): /note="Nucleotide may be methylated to form 5-methylcytosine"
ttgactgtgctggagaattcatttctaagttcatgcccatgactgttggcagaaggactccgttctgcactggctgttagctgagactgcagttccttactatatgggctatttgagtgtcc

SEQ ID NO: 12546 - DNA, 122 bp, Homo sapiens
  misc_feature (61)..(62): /note="This region represents a CpG dinucleotide"
  misc_feature (61)..(61): /note="Nucleotide may be methylated to form 5-methylcytosine"
ataactggaacaaaggccaggctgactgaaaagtcagctgaggctgggcctggtggctcacgcctgtaatcccagcactttgggaggccgaggtgggtggatcgcttgagcccaggagttca

SEQ ID NO: 12547 - DNA, 122 bp, Homo sapiens
  misc_feature (61)..(62): /note="This region represents a CpG dinucleotide"
  misc_feature (61)..(61): /note="Nucleotide may be methylated to form 5-methylcytosine"
acttgtcactccccagcaggaaaaggcgtctcctggttctaaaactgcctgctctctgcccgcacccttcagatcctcttttgtgtcagctgagccaagcaatttccggttccctgaactga

SEQ ID NO: 12548 - DNA, 122 bp, Homo sapiens
  misc_feature (61)..(62): /note="This region represents a CpG dinucleotide"
  misc_feature (61)..(61): /note="Nucleotide may be methylated to form 5-methylcytosine"
gcagctggaatatgtgtgtggctggggcagcccatgacagggccttaaccctagtaatgacgctgacagctttagtcactgaggggagtggccagaacctgctggtttggtcaatgggggac

SEQ ID NO: 12549 - DNA, 122 bp, Homo sapiens
  misc_feature (61)..(62): /note="This region represents a CpG dinucleotide"
  misc_feature (61)..(61): /note="Nucleotide may be methylated to form 5-methylcytosine"
ttttggctactttacaactgctgctacagcactatcagcaaaacactctatcactttgaacgaaggcatccaaatggcaaataaaagctttactcacttatctgattaaaatgtttaataaa

SEQ ID NO: 12550 - DNA, 122 bp, Homo sapiens
  misc_feature (61)..(62): /note="This region represents a CpG dinucleotide"
  misc_feature (61)..(61): /note="Nucleotide may be methylated to form 5-methylcytosine"
cagtgggaagcatacaaagtatggacacactggacaaagggatgattcacataacaggcacgaccagagggacaataagagatttcatcaggatactcaaaagggcacacaatttaaaacat

SEQ ID NO: 12551 - DNA, 122 bp, Homo sapiens
  misc_feature (61)..(62): /note="This region represents a CpG dinucleotide"
  misc_feature (61)..(61): /note="Nucleotide may be methylated to form 5-methylcytosine"
agtggagcagagtgagcacaaggaggagcattcggagatgaagtcagaggctgggccgtgcgccctgttgtaggtcagtgaaaggactttaggttttactctagggttaaaagtccctaaag

SEQ ID NO: 12552 - DNA, 122 bp, Homo sapiens
  misc_feature (61)..(62): /note="This region represents a CpG dinucleotide"
  misc_feature (61)..(61): /note="Nucleotide may be methylated to form 5-methylcytosine"
gaatccatgctgcagctgcccctcaccctaccccatcccaccacatccattaggactaagcgtagaagatcacttaatatagctcagaccaatcctcttgtgagtggtaagtgatgggttca

SEQ ID NO: 12553 - DNA, 122 bp, Homo sapiens
  misc_feature (61)..(62): /note="This region represents a CpG dinucleotide"
  misc_feature (61)..(61): /note="Nucleotide may be methylated to form 5-methylcytosine"
cttcccaattgctcattcatctaacacatacacaggctaatcagaggcaaacatccaccccgaactgttttagaaactagcttctcccatctgatactactgtatgtgtggtaagcagacat

SEQ ID NO: 12554 - DNA, 122 bp, Homo sapiens
  misc_feature (61)..(62): /note="This region represents a CpG dinucleotide"
  misc_feature (61)..(61): /note="Nucleotide may be methylated to form 5-methylcytosine"
tctccccagcagctggacataaatcccttccttcccacatctcttgaagccccgtggcaacgctaagctaggctaagaactcagcagaagaaagatacagaacagccaggactcagacccac

SEQ ID NO: 12555 - DNA, 122 bp, Homo sapiens
  misc_feature (61)..(62): /note="This region represents a CpG dinucleotide"
  misc_feature (61)..(61): /note="Nucleotide may be methylated to form 5-methylcytosine"
agattgcccatcaggtcactgtgggtgtgacagccactggctccagaagctcagtcctggcggcagctgtcaaaccaacacccacatagcctgcaagcagagggcaggcggggcagtttgta

SEQ ID NO: 12556 - DNA, 122 bp, Homo sapiens
  misc_feature (61)..(62): /note="This region represents a CpG dinucleotide"
  misc_feature (61)..(61): /note="Nucleotide may be methylated to form 5-methylcytosine"
cagtctggtcatcttgagtgcatcacgccctcactggcagttcagaatgttgcagggcatcgttagcatggattttgctgttgttagttttttcatgtttattgtctacttgttttctcctc

SEQ ID NO: 12557 - DNA, 122 bp, Homo sapiens
  misc_feature (61)..(62): /note="This region represents a CpG dinucleotide"
  misc_feature (61)..(61): /note="Nucleotide may be methylated to form 5-methylcytosine"
acctgctaatacctcaaacccttgttataagctcgataaacttgtgctatgtgctggtaacgagcagctaacgattgctcaggtgtttatattaaacagattaatcgaggacacagtcgatg

SEQ ID NO: 12558 - DNA, 122 bp, Homo sapiens
  misc_feature (61)..(62): /note="This region represents a CpG dinucleotide"
  misc_feature (61)..(61): /note="Nucleotide may be methylated to form 5-methylcytosine"
agatgaggcccagaaaaatttattatgcctacatgcccatgagatgtcccaggctggtgacgtctcatgggcattcaaggaatccattaagaatgaattctgaggctggacatggtgactca

SEQ ID NO: 12559 - DNA, 122 bp, Homo sapiens
  misc_feature (61)..(62): /note="This region represents a CpG dinucleotide"
  misc_feature (61)..(61): /note="Nucleotide may be methylated to form 5-methylcytosine"
gtccaaaaagacaggtgttaaccggtggagctgggtctaaatccacaattttctcagtgccgctacaatggtagcagaattaagcaggattttctagtccttacaaataggttcaaggcagc

SEQ ID NO: 12560 - DNA, 122 bp, Homo sapiens
  misc_feature (61)..(62): /note="This region represents a CpG dinucleotide"
  misc_feature (61)..(61): /note="Nucleotide may be methylated to form 5-methylcytosine"
gaaataccatttaaatgatgtgccttggttcacacagctagtatgtgggccgcagagcctcgccccacatttgtttgttcttggctgaacactatgaatggtgggattgaggactaagtctt

SEQ ID NO: 12561 - DNA, 122 bp, Homo sapiens
  misc_feature (61)..(62): /note="This region represents a CpG dinucleotide"
  misc_feature (61)..(61): /note="Nucleotide may be methylated to form 5-methylcytosine"
tttttttttttactgcatttttctcccttcagaatgtgagctcagctagggcagggaccacgtctatctcatccatcactgtttctccaccatgtagaacaatgcccagtgcatattggtac

SEQ ID NO: 12562 - DNA, 122 bp, Homo sapiens
  misc_feature (61)..(62): /note="This region represents a CpG dinucleotide"
  misc_feature (61)..(61): /note="Nucleotide may be methylated to form 5-methylcytosine"
cttccaggcaggctgcagtagcctggagcgccttatggatattaactccctcaaccctgacggcagcccagtggggagggtgcacttcccttcaagtcttacaggtgaggagacaaaagaca

SEQ ID NO: 12563 - DNA, 122 bp, Homo sapiens
  misc_feature (61)..(62): /note="This region represents a CpG dinucleotide"
  misc_feature (61)..(61): /note="Nucleotide may be methylated to form 5-methylcytosine"
gaagcagaattctggtgtcatagactaggttccggatcccgctctgtcactaattagttgcgtgatcttggacaggtaagttacttaaggtcttcaagttcagcttccttggttataaaaca

SEQ ID NO: 12564 - DNA, 122 bp, Homo sapiens
  misc_feature (61)..(62): /note="This region represents a CpG dinucleotide"
  misc_feature (61)..(61): /note="Nucleotide may be methylated to form 5-methylcytosine"
tctgactcggccttcagaatgtaccttcacttttgcaataaactgccttacacttatcttcgttaatgcatgtctcttgcttaaagtcttaaccaagaagacaagaaccgaggacacattcc

SEQ ID NO: 12565 - DNA, 122 bp, Homo sapiens
  misc_feature (61)..(62): /note="This region represents a CpG dinucleotide"
  misc_feature (61)..(61): /note="Nucleotide may be methylated to form 5-methylcytosine"
atgagatgtgactcagcagcccttccctttctagatgatctgcagattttctggtgttgtcgtcttttgtcctggggccagtttggagtggctgtctctactcatcctggccccgttggctg

SEQ ID NO: 12566 - DNA, 122 bp, Homo sapiens
  misc_feature (61)..(62): /note="This region represents a CpG dinucleotide"
  misc_feature (61)..(61): /note="Nucleotide may be methylated to form 5-methylcytosine"
gtaggaataagttaagctagaatcccttaaggttatggatctcaccatgagtcagctgaccgttacctactactagttaatatctaaacaaacagaccttctgttgtaacagtgcatcagtc

SEQ ID NO: 12567 - DNA, 122 bp, Homo sapiens
  misc_feature (61)..(62): /note="This region represents a CpG dinucleotide"
  misc_feature (61)..(61): /note="Nucleotide may be methylated to form 5-methylcytosine"
ttaaaataagaaagacctgtttgcccagcagtgagtaagcggctatccagcaggagtcagcggaggtgaggttggtaaggttggctagtgctggatcgtcatgggattggatgctggcttga

SEQ ID NO: 12568 - DNA, 122 bp, Homo sapiens
  misc_feature (61)..(62): /note="This region represents a CpG dinucleotide"
  misc_feature (61)..(61): /note="Nucleotide may be methylated to form 5-methylcytosine"
gacagaacatatggtatccttggctttggacctacagaggaaacacatttttctacctgccgtatgccagaggttcttgaacacctggagggatgactgcagcacagattgccgagccctac

SEQ ID NO: 12569 - DNA, 122 bp, Homo sapiens
  misc_feature (61)..(62): /note="This region represents a CpG dinucleotide"
  misc_feature (61)..(61): /note="Nucleotide may be methylated to form 5-methylcytosine"
tgagaatgaggaactgtccctgttttgttttcttttacccagtcaagtgtgtctcagctacgagtttgagcatatctgcttacagggaagcttgttgagtgtgtcagatatttttgggcctc

SEQ ID NO: 12570 - DNA, 122 bp, Homo sapiens
  misc_feature (61)..(62): /note="This region represents a CpG dinucleotide"
  misc_feature (61)..(61): /note="Nucleotide may be methylated to form 5-methylcytosine"
gcttgttttcttcttaatcttcttgtgttcatctagcctcacattgcatttgtcacacttcgttgaaaacctactgtttgtcaaagtgtctttctagtaatccagatatctcttcccccatg

SEQ ID NO: 12571 - DNA, 122 bp, Homo sapiens
  misc_feature (61)..(62): /note="This region represents a CpG dinucleotide"
  misc_feature (61)..(61): /note="Nucleotide may be methylated to form 5-methylcytosine"
tatttctgtaataggtttgttgtgagaataaagggagcttggtatcagctcttagaataccggacaggccacgttggctccactaagctgttgtcatcatccctaagggcacccagttaaaa

SEQ ID NO: 12572 - DNA, 122 bp, Homo sapiens
  misc_feature (61)..(62): /note="This region represents a CpG dinucleotide"
  misc_feature (61)..(61): /note="Nucleotide may be methylated to form 5-methylcytosine"
tcagctcttgctgtgcactgcctgacacgcgttgatgctgtgctttgtggagcctgtttacgtttggtagaaatggcaccatctagtacttaaaaaggatcatcaccacaataactgtttgg

SEQ ID NO: 12573 - DNA, 122 bp, Homo sapiens
  misc_feature (61)..(62): /note="This region represents a CpG dinucleotide"
  misc_feature (61)..(61): /note="Nucleotide may be methylated to form 5-methylcytosine"
atagcatggatacactgggtaaagggatgattcatgtcctggatgggatggagctggactcgcaggtcaacagaaaatttcatcatgctacttagaatggtgttgtatttaaaatatataag

SEQ ID NO: 12574 - DNA, 122 bp, Homo sapiens
  misc_feature (61)..(62): /note="This region represents a CpG dinucleotide"
  misc_feature (61)..(61): /note="Nucleotide may be methylated to form 5-methylcytosine"
tgatcctcaccagaacccagtgagggtaatattataattcttattttacaattgaggaaacgaagactgagaaagtgaaagactggctcaagactggtctcacagctagaaactaggtggaa

SEQ ID NO: 12575 - DNA, 122 bp, Homo sapiens
  misc_feature (61)..(62): /note="This region represents a CpG dinucleotide"
  misc_feature (61)..(61): /note="Nucleotide may be methylated to form 5-methylcytosine"
tacattctcaggactcttaacccaagatgagtgacatgcttcgaggctatccagctctgacgggtacagatggatgactcagtacatctcgatctttcagtcaagggcatctatttgtttcc

SEQ ID NO: 12576 - DNA, 122 bp, Homo sapiens
  misc_feature (61)..(62): /note="This region represents a CpG dinucleotide"
  misc_feature (61)..(61): /note="Nucleotide may be methylated to form 5-methylcytosine"
tccaacaacacagccagacttaaagaggtttgatgaaaggcgagtggctttgtttggaggcgctggtgctgggccctaggctcagtctgtggcatgcatgagaagctagtggcttatcaacg

SEQ ID NO: 12577 - DNA, 122 bp, Homo sapiens
  misc_feature (61)..(62): /note="This region represents a CpG dinucleotide"
  misc_feature (61)..(61): /note="Nucleotide may be methylated to form 5-methylcytosine"
gaagaactagaagtggatgccttgtgacatcgccagcttgtttccctgggcaactgactccgaggggtgagcaaatccctcagagaaatgctcctgacacagttatgtaagtctgtaattgg

SEQ ID NO: 12578 - DNA, 122 bp, Homo sapiens
  misc_feature (61)..(62): /note="This region represents a CpG dinucleotide"
  misc_feature (61)..(61): /note="Nucleotide may be methylated to form 5-methylcytosine"
gagtttctcagatcagtcaattccaggacagggtggcattggcaggattatcccagagtccgtaagagctgtggctgcatctttcagcccaaggacaaatctgaggtctgctggtaagttaa

SEQ ID NO: 12579 - DNA, 122 bp, Homo sapiens
  misc_feature (61)..(62): /note="This region represents a CpG dinucleotide"
  misc_feature (61)..(61): /note="Nucleotide may be methylated to form 5-methylcytosine"
ccaccttgacctcccaaagtgttataattgcaggcgtgagccactgtgcccagcctcgggcgagctgccgcttaaccactcaagtcatatccctgcatcttcgaatgggaacagtgactcac

SEQ ID NO: 12580 - DNA, 122 bp, Homo sapiens
  misc_feature (61)..(62): /note="This region represents a CpG dinucleotide"
  misc_feature (61)..(61): /note="Nucleotide may be methylated to form 5-methylcytosine"
gcagagatgtggggtgtatctttgtccaggccttcaccatgaacaaggctgtggtgctcacgccaccgacttaggaggtctgaccttgaactctgggagacttgaggaatgtctgatgactc

SEQ ID NO: 12581 - DNA, 122 bp, Homo sapiens
  misc_feature (61)..(62): /note="This region represents a CpG dinucleotide"
  misc_feature (61)..(61): /note="Nucleotide may be methylated to form 5-methylcytosine"
acagtttccactcaaggactaggaactgaatctctgcacccttaaaaccactctcttagccgggcgcggtggctcatacctgtaatcccagcactttgggaggccaaggcaggtggatcacg

SEQ ID NO: 12582 - DNA, 122 bp, Homo sapiens
  misc_feature (61)..(62): /note="This region represents a CpG dinucleotide"
  misc_feature (61)..(61): /note="Nucleotide may be methylated to form 5-methylcytosine"
tgattattgtagtactccaaatatttactgtaacatattaacctgtatcactaaattccacgttctcatttccctggctaatccacatgttcctggaatatccacatgtagagtacaaaaag

SEQ ID NO: 12583 - DNA, 122 bp, Homo sapiens
  misc_feature (61)..(62): /note="This region represents a CpG dinucleotide"
  misc_feature (61)..(61): /note="Nucleotide may be methylated to form 5-methylcytosine"
ggccagctggctctgtcttaacattaagtactcagttcaaacgtcacctactcagagtggcgcttcctgatcaggcagtctagagtaactatctaggtgctctattacattatcacaatatc

SEQ ID NO: 12584 - DNA, 122 bp, Homo sapiens
  misc_feature (61)..(62): /note="This region represents a CpG dinucleotide"
  misc_feature (61)..(61): /note="Nucleotide may be methylated to form 5-methylcytosine"
aaaagaaaggggggaaaagcacccagctacttgagctgcagctggacaggaaattgctaacgctgcttgcaaatccttactttgaacaggcagtttagggaatgccaggagcggaaaccgtt

SEQ ID NO: 12585 - DNA, 122 bp, Homo sapiens
  misc_feature (61)..(62): /note="This region represents a CpG dinucleotide"
  misc_feature (61)..(61): /note="Nucleotide may be methylated to form 5-methylcytosine"
agggagggatcacaggacagagaaagcttcctactgaaataagtagtaattctgactgggcgtgaatttccttgagcagaatctgggaggcaaacaggaattgcttcagatacaaacgtagg

SEQ ID NO: 12586 - DNA, 122 bp, Homo sapiens
  misc_feature (61)..(62): /note="This region represents a CpG dinucleotide"
  misc_feature (61)..(61): /note="Nucleotide may be methylated to form 5-methylcytosine"
tggtggcaaggaataaggagagtgaggaatatgactttgtggcaaatgctttaacttggacgtaagagctaagtctggcattgctgcaattgaatggatactattgtcccaactttgcagaa

SEQ ID NO: 12587 - DNA, 122 bp, Homo sapiens
  misc_feature (61)..(62): /note="This region represents a CpG dinucleotide"
  misc_feature (61)..(61): /note="Nucleotide may be methylated to form 5-methylcytosine"
tgtaagttacctaataccacattataagccaccctcacacttagtggcttaaaacaaccacgctttattattgttcatgcatctgtgggtcagttggacagttctgctcatcagggccagga

SEQ ID NO: 12588 - DNA, 122 bp, Homo sapiens
  misc_feature (61)..(62): /note="This region represents a CpG dinucleotide"
  misc_feature (61)..(61): /note="Nucleotide may be methylated to form 5-methylcytosine"
actgaccggtccaacttcttcacctttgaaacgaggtgaggacattattaactccactggcgcagcatcgaggtcttgatttacttatgaaaatgtaatcaatccaaagaacagtggctgac

SEQ ID NO: 12589 - DNA, 122 bp, Homo sapiens
  misc_feature (61)..(62): /note="This region represents a CpG dinucleotide"
  misc_feature (61)..(61): /note="Nucleotide may be methylated to form 5-methylcytosine"
cctgccctgtctcttccccactcccgcttcctgggatcacatcccagataaatcatcacccgagtccttggctccaaggatgcttatgtgtcaagcatggaacagtgcccagttctctgctg

SEQ ID NO: 12590 - DNA, 122 bp, Homo sapiens
  misc_feature (61)..(62): /note="This region represents a CpG dinucleotide"
  misc_feature (61)..(61): /note="Nucleotide may be methylated to form 5-methylcytosine"
aacgatgagatatcagagtttgggaagactcaggcagctggaatttgtggggcacaataccggagagaacaaatctgtatagtgagagagctctggagatctgtagaccaagggaccctgtg

SEQ ID NO: 12591 - DNA, 122 bp, Homo sapiens
  misc_feature (61)..(62): /note="This region represents a CpG dinucleotide"
  misc_feature (61)..(61): /note="Nucleotide may be methylated to form 5-methylcytosine"
tggcctgtggctggtcaaccaccttcatccctggagcagcttagagcctgctgtgactcacgctcctctactgacaggatgccagcctgctaggccatctgctgggcagggcctgaggagcc

SEQ ID NO: 12592 - DNA, 122 bp, Homo sapiens
  misc_feature (61)..(62): /note="This region represents a CpG dinucleotide"
  misc_feature (61)..(61): /note="Nucleotide may be methylated to form 5-methylcytosine"
ccaggttggggtacagaggtgtaatcatggctcactgctaaggttgggagattgacctctcgggctctgtcaatcttcctaccttagcctccctagtagctgggactataggcatgccacca

SEQ ID NO: 12593 - DNA, 122 bp, Homo sapiens
  misc_feature (61)..(62): /note="This region represents a CpG dinucleotide"
  misc_feature (61)..(61): /note="Nucleotide may be methylated to form 5-methylcytosine"
agcgttttatgatgcggccgtgggtgctggccttggctggggcttgtggcgactgggtgccgtgacgtgggggtggaccgggtagagcggggtcggcagggggccgagtccgggcgcccccc

SEQ ID NO: 12594 - DNA, 122 bp, Homo sapiens
  misc_feature (61)..(62): /note="This region represents a CpG dinucleotide"
  misc_feature (61)..(61): /note="Nucleotide may be methylated to form 5-methylcytosine"
gggctatgaaagtcctatgataagctccttgttctccaaatccatgcatataagtctcatcgagttggatgcattctaaagacattttgaaatcacatcaacactttcagatcagcaagtta

SEQ ID NO: 12595 - DNA, 122 bp, Homo sapiens
  misc_feature (61)..(62): /note="This region represents a CpG dinucleotide"
  misc_feature (61)..(61): /note="Nucleotide may be methylated to form 5-methylcytosine"
gctaactcttgagtataaaaatgtgttcagtgttgaggatcccaatatgagtaatatgtacgccctgtcatcatgatgggaactgacaattgaatagaagaggataagaaacagacaagaaa

SEQ ID NO: 12596 - DNA, 122 bp, Homo sapiens
  misc_feature (61)..(62): /note="This region represents a CpG dinucleotide"
  misc_feature (61)..(61): /note="Nucleotide may be methylated to form 5-methylcytosine"
ctcacaacttcctttgtggctaattttttcccatcagtatcctgctttttctgcagcttccgttgacgaaggtacattttacctctggaaccggtggagcagagagctgaatataccctgtt

SEQ ID NO: 12597 - DNA, 122 bp, Homo sapiens
  misc_feature (61)..(62): /note="This region represents a CpG dinucleotide"
  misc_feature (61)..(61): /note="Nucleotide may be methylated to form 5-methylcytosine"
tcccttcacaattacttcttatttctactctcctcaacttgtttcaggtctgtattacctcgtaactacatgattaagtagaattttcacctctgcagtgaggtagagagtcaggttatact

SEQ ID NO: 12598 - DNA, 122 bp, Homo sapiens
  misc_feature (61)..(62): /note="This region represents a CpG dinucleotide"
  misc_feature (61)..(61): /note="Nucleotide may be methylated to form 5-methylcytosine"
aggggcagggcagggccaggtcgaatgctaaggccatgcccagagcagggtcaaggcagacgcagggccacatcatggcagggccaggttagcacagggccgaggaaaggccagggcaggta

SEQ ID NO: 12599 - DNA, 122 bp, Homo sapiens
  misc_feature (61)..(62): /note="This region represents a CpG dinucleotide"
  misc_feature (61)..(61): /note="Nucleotide may be methylated to form 5-methylcytosine"
aaatccagtaagagactgaaaatcagatgattcacttattctgcaccatccccatggcctcgcagaaccagaaatgcctattgttatttccatgtccacttcaaccatgaggaagcccaata

SEQ ID NO: 12600 - DNA, 122 bp, Homo sapiens
  misc_feature (61)..(62): /note="This region represents a CpG dinucleotide"
  misc_feature (61)..(61): /note="Nucleotide may be methylated to form 5-methylcytosine"
ttactgtctactgctcctcacttcttcctgagaaaccagatgacttgcagttctgcaacacgctgcctttttccacctctttacctttaccatagcaactcttaatccaaaacgttcttcct

SEQ ID NO: 12601 - DNA, 122 bp, Homo sapiens
  misc_feature (61)..(62): /note="This region represents a CpG dinucleotide"
  misc_feature (61)..(61): /note="Nucleotide may be methylated to form 5-methylcytosine"
gagctgagcaaaatgaggattcaaattacaggagcgcagagtaaacttttggcatattagcggacatcttggtaagtttctcaggacagtgtttttcagagatgacaggattaaagagaaac

SEQ ID NO: 12602 - DNA, 122 bp, Homo sapiens
  misc_feature (61)..(62): /note="This region represents a CpG dinucleotide"
  misc_feature (61)..(61): /note="Nucleotide may be methylated to form 5-methylcytosine"
tcatggacttggtgtctgcccttgaatttggcctgtcaggtcctctttgttaagcaggcacgcactgcctagtgctgggtgttaaggatcaaaaaatgggtgtgactgtagaaaaacagatt

SEQ ID NO: 12603 - DNA, 122 bp, Homo sapiens
  misc_feature (61)..(62): /note="This region represents a CpG dinucleotide"
  misc_feature (61)..(61): /note="Nucleotide may be methylated to form 5-methylcytosine"
ttccacctccagtgcccagccccggggctggttgatgcataggtcctgcccactccaggacgctagtcacccaacagggttcagcccaggtgctggtgagacacttctcatccacccctcat

SEQ ID NO: 12604 - DNA, 122 bp, Homo sapiens
  misc_feature (61)..(62): /note="This region represents a CpG dinucleotide"
  misc_feature (61)..(61): /note="Nucleotide may be methylated to form 5-methylcytosine"
ttcaatgccagtcttgtataagctcctgtttggccagtgggtccagtcagaggctaaacacgcccacactctctctcagtcttgtccatacagttaatggcactccctccttcctctgtgca

SEQ ID NO: 12605 - DNA, 122 bp, Homo sapiens
  misc_feature (61)..(62): /note="This region represents a CpG dinucleotide"
  misc_feature (61)..(61): /note="Nucleotide may be methylated to form 5-methylcytosine"
tggggccctctgaaaccaaatgcacaaatactgattgaaagtccactgcatgtacctgcacgtacactgttgggtgatttctttgagatcaagatggctgtaataaacagcttaaaggctta

SEQ ID NO: 12606 - DNA, 122 bp, Homo sapiens
  misc_feature (61)..(62): /note="This region represents a CpG dinucleotide"
  misc_feature (61)..(61): /note="Nucleotide may be methylated to form 5-methylcytosine"
cggccacaggcctcagaagcagcaggagtgagctgtgggcacagctgtggggcagccaggcgcgtcaggcctcacatgtctgggagatgtaggctgcctgggctggtggcccctgagccgca

SEQ ID NO: 12607 - DNA, 122 bp, Homo sapiens
  misc_feature (61)..(62): /note="This region represents a CpG dinucleotide"
  misc_feature (61)..(61): /note="Nucleotide may be methylated to form 5-methylcytosine"
atcacatgtcgtggcggatacaatattgagatctccaggcttagcagaccacgagtgctgcgtgcttcgcgatggaaacaggtgtgaacctgagatggcagtgatcacatgagtgggggcct

SEQ ID NO: 12608 - DNA, 122 bp, Homo sapiens
  misc_feature (61)..(62): /note="This region represents a CpG dinucleotide"
  misc_feature (61)..(61): /note="Nucleotide may be methylated to form 5-methylcytosine"
gaaggatctgaggcagaggacgtggatggtgccatgctggcgtctctgtgcatctggcagcgcaacaaaggacttctgtctgccctgcgaggctgggtcggtaaaacccacttcaattgaaa

SEQ ID NO: 12609 - DNA, 122 bp, Homo sapiens
  misc_feature (61)..(62): /note="This region represents a CpG dinucleotide"
  misc_feature (61)..(61): /note="Nucleotide may be methylated to form 5-methylcytosine"
attcatgaatttatattagtttgatgcatatctcttccactggacttccaacctctggagcgcaggaaccacactgtatttaattctggagcctcagggcctggcacaatgtcaagcacaca

SEQ ID NO: 12610 - DNA, 122 bp, Homo sapiens
  misc_feature (61)..(62): /note="This region represents a CpG dinucleotide"
  misc_feature (61)..(61): /note="Nucleotide may be methylated to form 5-methylcytosine"
ctgtccaaaagcaaactcagtggtccttcccaggtctctggccacttctggccccgggaacgtagagcggcttctgcatctccctgactcacctcggagtaggctctgtgggagacaccgcc

SEQ ID NO: 12611 - DNA, 122 bp, Homo sapiens
  misc_feature (61)..(62): /note="This region represents a CpG dinucleotide"
  misc_feature (61)..(61): /note="Nucleotide may be methylated to form 5-methylcytosine"
attgagtttattcaatcacttaacaatatatattaggtctgggctgggcacgctggctcacgcctgtaataatcccagcactttgggaggccaaggcaggcggatcatctgaggtcggaagt

SEQ ID NO: 12612 - DNA, 122 bp, Homo sapiens
  misc_feature (61)..(62): /note="This region represents a CpG dinucleotide"
  misc_feature (61)..(61): /note="Nucleotide may be methylated to form 5-methylcytosine"
gtctgtcttatgagtgcacacaagcattttttgcagggaggtacagatccttccactaggcgtttctaactgtaacttagtcatacacattgagccaagcctatctgatacctcctcatcct

SEQ ID NO: 12613 - DNA, 122 bp, Homo sapiens
  misc_feature (61)..(62): /note="This region represents a CpG dinucleotide"
  misc_feature (61)..(61): /note="Nucleotide may be methylated to form 5-methylcytosine"
aacctggtgtactgtgcgtgctgtggggctgtgtctctgctgccctcggtgtgcagagtccgctgggtgaagctcttcctagtttctagctcatctttgggcaggctcacggctgtgatgga

SEQ ID NO: 12614 - DNA, 122 bp, Homo sapiens
  misc_feature (61)..(62): /note="This region represents a CpG dinucleotide"
  misc_feature (61)..(61): /note="Nucleotide may be methylated to form 5-methylcytosine"
tacatctataaactggtatccgttttcatacattggtcttataagtttggattctatgagcgcacccacagagatgaatgtgctatttgctgatgaaatcagtttctaagcctgcaatgctg

SEQ ID NO: 12615 - DNA, 122 bp, Homo sapiens
  misc_feature (61)..(62): /note="This region represents a CpG dinucleotide"
  misc_feature (61)..(61): /note="Nucleotide may be methylated to form 5-methylcytosine"
aataattccatcgtttcattttgtggcatcagagatgagtcattgacccggaagaagtcccgtaatgtttctcaactcagtatctgtgactatatttcctgctcttaaaagtttagcatgcc

SEQ ID NO: 12616 - DNA, 122 bp, Homo sapiens
  misc_feature (61)..(62): /note="This region represents a CpG dinucleotide"
  misc_feature (61)..(61): /note="Nucleotide may be methylated to form 5-methylcytosine"
aagcctgaccatcactcacagagggtagtcatggttcagaacacgagatgtggagtcaggcggccctaggttccggtccagggattactgagtcaaagagtatttgcatatttaccattgag

SEQ ID NO: 12617 - DNA, 122 bp, Homo sapiens
  misc_feature (61)..(62): /note="This region represents a CpG dinucleotide"
  misc_feature (61)..(61): /note="Nucleotide may be methylated to form 5-methylcytosine"
gtgtttggatttaaaaaccagagatcccaggtaggttagttccagctccccagctaaagacgtattacgtgattagccagcctctttttccttctaaattaaaaggattaagtatattttag

SEQ ID NO: 12618 - DNA, 122 bp, Homo sapiens
  misc_feature (61)..(62): /note="This region represents a CpG dinucleotide"
  misc_feature (61)..(61): /note="Nucleotide may be methylated to form 5-methylcytosine"
ttggtatgaaggtcacctatgagtgatgatcacatcatgggcgtgggccagctgacaaagcgcttcctcagctgtgccctggcctcacacgggacacatggtggacacctgacaagacttag

SEQ ID NO: 12619 - DNA, 122 bp, Homo sapiens
  misc_feature (61)..(62): /note="This region represents a CpG dinucleotide"
  misc_feature (61)..(61): /note="Nucleotide may be methylated to form 5-methylcytosine"
cggagacggctgggacagaagctgcttgtcaggccagcctgggcaccttgggtgtctcgtcggtgcacgatgcattacacggcctttctgagaaggaggtgagctgcccgtggggagggaga

SEQ ID NO: 12620 - DNA, 122 bp, Homo sapiens
  misc_feature (61)..(62): /note="This region represents a CpG dinucleotide"
  misc_feature (61)..(61): /note="Nucleotide may be methylated to form 5-methylcytosine"
aggaagagaactgctcaacacaaaagtggacagaaaaagatcagtcttagagagtcttggcggggttagaatttatcctgttgcatgctcgatgtgatatcactaaaggatctaagcaggat

SEQ ID NO: 12621 - DNA, 122 bp, Homo sapiens
  misc_feature (61)..(62): /note="This region represents a CpG dinucleotide"
  misc_feature (61)..(61): /note="Nucleotide may be methylated to form 5-methylcytosine"
aatgtgaagtgcatacatcatgctgaaggattttgtctcagccacggaggtaatagtcagcgaggtcaggtcaaagagggttaaaccaagccaggatatagccaaagaaatacatcaaacgc

SEQ ID NO: 12622 - DNA, 122 bp, Homo sapiens
  misc_feature (61)..(62): /note="This region represents a CpG dinucleotide"
  misc_feature (61)..(61): /note="Nucleotide may be methylated to form 5-methylcytosine"
tccactcaggactcacatgctaatctccttggaaaacaccgtagagacacacaccaagatcgtgctttaacaggtttccaggtattccttaagccggacaagtgtgatgacagttaatcatc

SEQ ID NO: 12623 - DNA, 122 bp, Homo sapiens
  misc_feature (61)..(62): /note="This region represents a CpG dinucleotide"
  misc_feature (61)..(61): /note="Nucleotide may be methylated to form 5-methylcytosine"
atacatttttgacttatgatattttcaatgtatgatgggtttatcaggatgtaactgcatcgtgagttaaggtgcagttgtattctaagacctctacaaaaaacattgacagcctattgctg

SEQ ID NO: 12624 - DNA, 122 bp, Homo sapiens
  misc_feature (61)..(62): /note="This region represents a CpG dinucleotide"
  misc_feature (61)..(61): /note="Nucleotide may be methylated to form 5-methylcytosine"
gagggctgaaccagccaaagcctttaagaacctggcactccagggttggtacagagcaggcgctcaacagccgccacttatcaatggtagtgacttgctaataaactcatccctgctgatct

SEQ ID NO: 12625 - DNA, 122 bp, Homo sapiens
  misc_feature (61)..(62): /note="This region represents a CpG dinucleotide"
  misc_feature (61)..(61): /note="Nucleotide may be methylated to form 5-methylcytosine"
ctagggtaagcggcagagatttaggagattaagtcctgccagggtgtagcctctgcagggcgggaaggctgagattacaattttaaaactgaatatttattgaatgcttacattcagccaat

SEQ ID NO: 12626 - DNA, 122 bp, Homo sapiens
  misc_feature (61)..(62): /note="This region represents a CpG dinucleotide"
  misc_feature (61)..(61): /note="Nucleotide may be methylated to form 5-methylcytosine"
atttgcttctcaaaactatactctgaaatagagcagatatgatttctttttgaaagtagacgaaaataggatttagaaaggttagtttaggaatttgcccaaggtaacatgacaagatgaga

SEQ ID NO: 12627 - DNA, 122 bp, Homo sapiens
  misc_feature (61)..(62): /note="This region represents a CpG dinucleotide"
  misc_feature (61)..(61): /note="Nucleotide may be methylated to form 5-methylcytosine"
agttgtatttaatcagcttgtcttaggtcacatgatttcatgaatggccctaaatatacccgcaagtccataaagatgcaccagcagaaatatatttctatttttatttcttacttatttta

SEQ ID NO: 12628 - DNA, 122 bp, Homo sapiens
  misc_feature (61)..(62): /note="This region represents a CpG dinucleotide"
  misc_feature (61)..(61): /note="Nucleotide may be methylated to form 5-methylcytosine"
aatctaatgctgctgctgatctgactggaggcagagctcaggtgataatgttcactcactcgctgctcacttcctgctatgcagcctggtttcctaacaggccatgaactgcccaggggttg

SEQ ID NO: 12629 - DNA, 122 bp, Homo sapiens
  misc_feature (61)..(62): /note="This region represents a CpG dinucleotide"
  misc_feature (61)..(61): /note="Nucleotide may be methylated to form 5-methylcytosine"
caggtcacaaagaactgaggaactcaaggactcacactcaccaggttctccaaagcagatcggtgctagagtaccaggagtttaagagttgtgcagcagggaacctctttataggacgttct

SEQ ID NO: 12630 - DNA, 122 bp, Homo sapiens
  misc_feature (61)..(62): /note="This region represents a CpG dinucleotide"
  misc_feature (61)..(61): /note="Nucleotide may be methylated to form 5-methylcytosine"
ctagagcatggaggctttttcactgaaatctgtttgctcttctcagagcgtagcccaaggcgtgcaaatgtaaacacctgtaatgtaatgagaagtgagttggagatgagaaatgtgtcact

SEQ ID NO: 12631 - DNA, 122 bp, Homo sapiens
  misc_feature (61)..(62): /note="This region represents a CpG dinucleotide"
  misc_feature (61)..(61): /note="Nucleotide may be methylated to form 5-methylcytosine"
tttgaattactcacctgagaactgctgaggagcacaaatgtcatggggataaatcaagcccgtgagattggcatctctcagcagctaggtgactagctcaggggccatgaagccaccagccc

SEQ ID NO: 12632 - DNA, 122 bp, Homo sapiens
  misc_feature (61)..(62): /note="This region represents a CpG dinucleotide"
  misc_feature (61)..(61): /note="Nucleotide may be methylated to form 5-methylcytosine"
aaacagaagcaggacagtcttgctctgcagccttgggcgggatagcacaaaggccaggagcgtggagctccgtggctctagatcctgcctgtcacctgtcatgtgtgtgacttgggcaggtt

SEQ ID NO: 12633 - DNA, 122 bp, Homo sapiens
  misc_feature (61)..(62): /note="This region represents a CpG dinucleotide"
  misc_feature (61)..(61): /note="Nucleotide may be methylated to form 5-methylcytosine"
gcaccaagagtaggccccagttgcataatcagttgttaaaatacttggcttccagctgggcgtggtgactcactcctgtaatcccagcactttcggaggccgaggcggatggatcacatgag

SEQ ID NO: 12634 - DNA, 122 bp, Homo sapiens
  misc_feature (61)..(62): /note="This region represents a CpG dinucleotide"
  misc_feature (61)..(61): /note="Nucleotide may be methylated to form 5-methylcytosine"
tttagagacaaagatgaggtttaggaggtgcttgttcaaggattaaacctgaaggtgtggcgggataacattccccaggagggcattatgtggaaggaagagagactacgtgttctcattta

SEQ ID NO: 12635 - DNA, 122 bp, Homo sapiens
  misc_feature (61)..(62): /note="This region represents a CpG dinucleotide"
  misc_feature (61)..(61): /note="Nucleotide may be methylated to form 5-methylcytosine"
gattttacaatgagtcaggccactgtgaagggacatgctctgccggtcctgtgtttgagccgctggagaacaattaggagaactgtctatgtctgcgctcctccctggctctccatatccac

SEQ ID NO: 12636 - DNA, 122 bp, Homo sapiens
  misc_feature (61)..(62): /note="This region represents a CpG dinucleotide"
  misc_feature (61)..(61): /note="Nucleotide may be methylated to form 5-methylcytosine"
ctggcggagagcctcagaaccacctgtttcctctgctgcaccatgcttgagtgtggaagccgtgcccctgttctccacagcgtgtatggccattcggcacatgtgtagatttgctgaatgag

SEQ ID NO: 12637 - DNA, 122 bp, Homo sapiens
  misc_feature (61)..(62): /note="This region represents a CpG dinucleotide"
  misc_feature (61)..(61): /note="Nucleotide may be methylated to form 5-methylcytosine"
ataactgttctgagctggccactgtcccagggattcatccagctttatgtgacttttcatcgccttggctgttgagcagaatgaaattcagtgtagcttgtgatgcagatgccaggaaaaag

SEQ ID NO: 12638 - DNA, 122 bp, Homo sapiens
  misc_feature (61)..(62): /note="This region represents a CpG dinucleotide"
  misc_feature (61)..(61): /note="Nucleotide may be methylated to form 5-methylcytosine"
tggaatctggaatctgggactggcttgctgggtggcttcagctcagcctcatgaggttgccgtcaggccatgggctggagtcgctgtcttcccagggctgtagaatctgctttcagggtgac

SEQ ID NO: 12639 - DNA, 122 bp, Homo sapiens
  misc_feature (61)..(62): /note="This region represents a CpG dinucleotide"
  misc_feature (61)..(61): /note="Nucleotide may be methylated to form 5-methylcytosine"
gtgaattgtggtagggtgttgccaaatgggaaggcccttcctggatctctgtgtctgcatcgcagagttttctagagtaggaggctgttgtttaatgttgcctaatgccaacgttagagctc

SEQ ID NO: 12640 - DNA, 122 bp, Homo sapiens
  misc_feature (61)..(62): /note="This region represents a CpG dinucleotide"
  misc_feature (61)..(61): /note="Nucleotide may be methylated to form 5-methylcytosine"
ctacgaccttcctgcttccatgctagctgcaattcaggaatggcctcaggggcacttacacgttgccaccatcaatgacaacaccgtgaaattggtctcattgttgccatttcacacgtggg

SEQ ID NO: 12641 - DNA, 122 bp, Homo sapiens
  misc_feature (61)..(62): /note="This region represents a CpG dinucleotide"
  misc_feature (61)..(61): /note="Nucleotide may be methylated to form 5-methylcytosine"
aatgcttctcctgaatctttgcacgcacatagcaatattcctggtctcacatctagatttcgtcacgtatcccgttttattgtataatagtcttggatattcctcatcttaatttccctggc

SEQ ID NO: 12642 - DNA, 122 bp, Homo sapiens
  misc_feature (61)..(62): /note="This region represents a CpG dinucleotide"
  misc_feature (61)..(61): /note="Nucleotide may be methylated to form 5-methylcytosine"
ctcaggtaatctgcccgcctcggcctcccaaagggctggaattacagatgtgagccaccacgcccggccaacaaggtcaaataacctgtccaaggcctgcagccaggcaggaagtgacagaa

SEQ ID NO: 12643 - DNA, 122 bp, Homo sapiens
  misc_feature (61)..(62): /note="This region represents a CpG dinucleotide"
  misc_feature (61)..(61): /note="Nucleotide may be methylated to form 5-methylcytosine"
gggcccaggcgcaataggaaactggttaggttgggctttgatccacacattctcctgcatcgaatcccccttttctccccaatctcttctaaagaaagactgaaaactcgctccaagaaaag

SEQ ID NO: 12644 - DNA, 122 bp, Homo sapiens
  misc_feature (61)..(62): /note="This region represents a CpG dinucleotide"
  misc_feature (61)..(61): /note="Nucleotide may be methylated to form 5-methylcytosine"
agcaatgcctgtgagcccttgcttcaccagcattagcatcatttggaagcttgttagacacgcagaatctcaggccccaccccagacctgctgaatcaggatttgcaactgcaattagcccc

SEQ ID NO: 12645 - DNA, 122 bp, Homo sapiens
  misc_feature (61)..(62): /note="This region represents a CpG dinucleotide"
  misc_feature (61)..(61): /note="Nucleotide may be methylated to form 5-methylcytosine"
gaaatcttgccctacattgttatgcagcactactgcgaagctggcacacctttctgcttgcgctgcctctagcacctcacccagcaactaacccagtttagtcagaccttccaacgttaagg

SEQ ID NO: 12646 - DNA, 122 bp, Homo sapiens
  misc_feature (61)..(62): /note="This region represents a CpG dinucleotide"
  misc_feature (61)..(61): /note="Nucleotide may be methylated to form 5-methylcytosine"
ttttttaaacaatactgagaagcaagcagtaagctcttttctcaagccacacctgacttacgtgcattcacatgcccatgcttccaagggaaagccagccccactcctactgtactgaccca

SEQ ID NO: 12647 - DNA, 122 bp, Homo sapiens
  misc_feature (61)..(62): /note="This region represents a CpG dinucleotide"
  misc_feature (61)..(61): /note="Nucleotide may be methylated to form 5-methylcytosine"
cagatgagtaaagctggctgactaaagcacaataggcaatggcaggtattgcagcaaattcgggaacacaaactactaagagtggggtggggatgaggaggcaataaactccttagctacca

SEQ ID NO: 12648 - DNA, 122 bp, Homo sapiens
  misc_feature (61)..(62): /note="This region represents a CpG dinucleotide"
  misc_feature (61)..(61): /note="Nucleotide may be methylated to form 5-methylcytosine"
agctggattctgtcaccttggagctcttgtgtcactgacctagctgatgatttatcctctcgccagagtcagagaacttttgttgctcatgattagtttgccctgagacaaagggaaattac

SEQ ID NO: 12649 - DNA, 122 bp, Homo sapiens
  misc_feature (61)..(62): /note="This region represents a CpG dinucleotide"
  misc_feature (61)..(61): /note="Nucleotide may be methylated to form 5-methylcytosine"
tccagagaattcattcaagcctcagaggcttaactttttattgttgttctgcctctgattcgctatttcactttgagaactatgcaaagttaactgactcagcattacagcccaaatccacc

SEQ ID NO: 12650 - DNA, 122 bp, Homo sapiens
  misc_feature (61)..(62): /note="This region represents a CpG dinucleotide"
  misc_feature (61)..(61): /note="Nucleotide may be methylated to form 5-methylcytosine"
tcagctgcaacatcctgctggctaatgcagtgtttctcaaactgccagtcatgatgtatccgtgagttgtgaaatcggtttagcaggcagggctggctgcatgatgtgtggggctcagtgca

SEQ ID NO: 12651 - DNA, 122 bp, Homo sapiens
  misc_feature (61)..(62): /note="This region represents a CpG dinucleotide"
  misc_feature (61)..(61): /note="Nucleotide may be methylated to form 5-methylcytosine"
aaagcacgttgctcttacctcttttaaagaacttatcacattatattgcaatttgttttgcgtgcttggtctgtccctcactagacgatgtactccttcagggcgtgtcttattattccttg

SEQ ID NO: 12652 - DNA, 122 bp, Homo sapiens
  misc_feature (61)..(62): /note="This region represents a CpG dinucleotide"
  misc_feature (61)..(61): /note="Nucleotide may be methylated to form 5-methylcytosine"
gataccagcaggggtgatacatgaagaaaacccattataaatcttccgtgcatgccgttgcggggtggtgcgttgtcagacatagagattgaaatcactcagccttgtggtcatgaggcgtg

SEQ ID NO: 12653 - DNA, 122 bp, Homo sapiens
  misc_feature (61)..(62): /note="This region represents a CpG dinucleotide"
  misc_feature (61)..(61): /note="Nucleotide may be methylated to form 5-methylcytosine"
gcctcagatgtctcatctctaaatgaagaatgacctcatagggatgataagaggaatacacgaagtcatagctgtaaacttcttagtacagtgtctaacagaaatggttcactagcactcaa

SEQ ID NO: 12654 - DNA, 122 bp, Homo sapiens
  misc_feature (61)..(62): /note="This region represents a CpG dinucleotide"
  misc_feature (61)..(61): /note="Nucleotide may be methylated to form 5-methylcytosine"
tcaggcaagtgtggggcaacttctaggggccagcatatgtcactggtgtccccagcagggcgtctccaggggatcattagggtgtagtacttggctgaacacaaaagtagttgcatttgcca

SEQ ID NO: 12655 - DNA, 122 bp, Homo sapiens
  misc_feature (61)..(62): /note="This region represents a CpG dinucleotide"
  misc_feature (61)..(61): /note="Nucleotide may be methylated to form 5-methylcytosine"
agagtgggaggaggaggacaatttcgcacctgagtgatccttttcataaaaatgggatcacgttacttcctactaagagaagggaaatgttatccgagaatgtggggctctcattctcggat

SEQ ID NO: 12656 - DNA, 122 bp, Homo sapiens
  misc_feature (61)..(62): /note="This region represents a CpG dinucleotide"
  misc_feature (61)..(61): /note="Nucleotide may be methylated to form 5-methylcytosine"
tgagccgcgcccgtcttcccgggccgcgtgtcgtgagccgcacccatcttcctggggctacgtgtcttgagcggcacccatatacctgctgtgcactggctggcctcaagctttgtcctgaa

SEQ ID NO: 12657 - DNA, 122 bp, Homo sapiens
  misc_feature (61)..(62): /note="This region represents a CpG dinucleotide"
  misc_feature (61)..(61): /note="Nucleotide may be methylated to form 5-methylcytosine"
aacagtgctaaaatacaatagtgggattacattcaccacggaatcaccagttacagccagcgtcgcctgaaatacattttccagcaaggaagctgcattttcaggaccttctctgttattca

SEQ ID NO: 12658 - DNA, 122 bp, Homo sapiens
  misc_feature (61)..(62): /note="This region represents a CpG dinucleotide"
  misc_feature (61)..(61): /note="Nucleotide may be methylated to form 5-methylcytosine"
tgtctttcaaaggacttacttaattaggtcaggcccacacaggataatcttcccttgattcgctcggtgaactgagtaagggccttaattatatctgcaaaatgctttcacctctgctgtat

SEQ ID NO: 12659 - DNA, 122 bp, Homo sapiens
  misc_feature (61)..(62): /note="This region represents a CpG dinucleotide"
  misc_feature (61)..(61): /note="Nucleotide may be methylated to form 5-methylcytosine"
aagggtttcacgggctatgactaaagccaggcctggtttacttgtttcctcactccagaccgatatgctttctgagacattctctgaggcagatttggggcctactttagggtttattttaa

SEQ ID NO: 12660 - DNA, 122 bp, Homo sapiens
  misc_feature (61)..(62): /note="This region represents a CpG dinucleotide"
  misc_feature (61)..(61): /note="Nucleotide may be methylated to form 5-methylcytosine"
tctcgctctttcctttggccttttgttatttctgagggctacagatcctggaactgcagccgtgatgggaagaacaggacacagggtgcccagcaggaaatgccaggcactgaatggaaggt

SEQ ID NO: 12661 - DNA, 122 bp, Homo sapiens
  misc_feature (61)..(62): /note="This region represents a CpG dinucleotide"
  misc_feature (61)..(61): /note="Nucleotide may be methylated to form 5-methylcytosine"
tcaaatatgcattgaacaagcatgaacaccgagcatacagtccaaacaaataagtcttagcgtatgatctacaccaaaatgtctccaggaaaaccactatgccatttatttccattttttaa

SEQ ID NO: 12662 - DNA, 122 bp, Homo sapiens
  misc_feature (61)..(62): /note="This region represents a CpG dinucleotide"
  misc_feature (61)..(61): /note="Nucleotide may be methylated to form 5-methylcytosine"
tgttcttgccgtcaagaaatgctgtctattgcaccaccctttgaatctgtgcttggccaacggacactaagaaagatgacataagccgaggcttgaaaagaacttgtgtgcatcagggcttg

SEQ ID NO: 12663 - DNA, 122 bp, Homo sapiens
  misc_feature (61)..(62): /note="This region represents a CpG dinucleotide"
  misc_feature (61)..(61): /note="Nucleotide may be methylated to form 5-methylcytosine"
tgcctggtttgagtattaggttatctttagtgcaggaccatcctggtttggaggtagcatcgtgtggtagtttaagcacagactttgaagtcagactttctagattcgaatcccagttctgc

SEQ ID NO: 12664 - DNA, 122 bp, Homo sapiens
  misc_feature (61)..(62): /note="This region represents a CpG dinucleotide"
  misc_feature (61)..(61): /note="Nucleotide may be methylated to form 5-methylcytosine"
agcctccggggcaacactggagctcttcggcatggtgttgtgcctgctgttccagcagttcgtaacgggctgtgctgctcctagccttgggggctttgcacatgctgtgtcctctgcagggg

SEQ ID NO: 12665 - DNA, 122 bp, Homo sapiens
  misc_feature (61)..(62): /note="This region represents a CpG dinucleotide"
  misc_feature (61)..(61): /note="Nucleotide may be methylated to form 5-methylcytosine"
cggccctgcatcttctgctgtgggccagcctctccaaattagtcactgcttcagagcttgcgtcccatccagggcagtatggcaacttctgggtgtgtctcccagctgcctctgtaacttca

SEQ ID NO: 12666 - DNA, 122 bp, Homo sapiens
  misc_feature (61)..(62): /note="This region represents a CpG dinucleotide"
  misc_feature (61)..(61): /note="Nucleotide may be methylated to form 5-methylcytosine"
gttaagctagtactgacagaaaaaggaaaagcctgtccaggtggctgggcaaccctgcagcgaggcatagatgagcttgtaaatcaaaggaaatgaccaaggtgagtctcaatccttttaga

SEQ ID NO: 12667 - DNA, 122 bp, Homo sapiens
  misc_feature (61)..(62): /note="This region represents a CpG dinucleotide"
  misc_feature (61)..(61): /note="Nucleotide may be methylated to form 5-methylcytosine"
ctaactgcttgttgatgtttcctaatacatttcctacagtgacctcaagctcagcatgtccgcattccggattcctcctccccgcccagactggctctgcctgctgcgtcctgctgggacac

SEQ ID NO: 12668 - DNA, 122 bp, Homo sapiens
  misc_feature (61)..(62): /note="This region represents a CpG dinucleotide"
  misc_feature (61)..(61): /note="Nucleotide may be methylated to form 5-methylcytosine"
aaactggatttctggctcctcttgcaactcagaggattggacaagctgggccagcattcccgcatgggcacaaggagctggagctcagaggcactcccaactctggatgaggtgtggttttc

SEQ ID NO: 12669 - DNA, 122 bp, Homo sapiens
  misc_feature (61)..(62): /note="This region represents a CpG dinucleotide"
  misc_feature (61)..(61): /note="Nucleotide may be methylated to form 5-methylcytosine"
ttcactcaccactcactcactcattgactcatccagggcaacttccgttcctgtaagcctcgtccatggtaagtgcgccattcaggtgtaccatttttatctttttgtaattgtaattttaa

SEQ ID NO: 12670 - DNA, 122 bp, Homo sapiens
  misc_feature (61)..(62): /note="This region represents a CpG dinucleotide"
  misc_feature (61)..(61): /note="Nucleotide may be methylated to form 5-methylcytosine"
agcaggcctggcctgggagggccctgattctcatcttaagcaacactggtacctattccacgtggcccgctctgggcagccaacaggttaaggaggccactcctctggagtcaggggtcccc

SEQ ID NO: 12671 - DNA, 122 bp, Homo sapiens
  misc_feature (61)..(62): /note="This region represents a CpG dinucleotide"
  misc_feature (61)..(61): /note="Nucleotide may be methylated to form 5-methylcytosine"
accctcttactagcaggaaaaaccctgcctagccttcaggcccattcaagtcttaatctacgtcattttgagctcctatttatagctagagacattgttatgtaagttacccatggcatttg

SEQ ID NO: 12672 - DNA, 122 bp, Homo sapiens
  misc_feature (61)..(62): /note="This region represents a CpG dinucleotide"
  misc_feature (61)..(61): /note="Nucleotide may be methylated to form 5-methylcytosine"
ttgtggatttcttttttcttgcatagcaccttttaatctttgaccagctacaactatgttcgtacagtcttgaatccttaaaaaagctgttgggcttggcacagtgactcacaacctataat

SEQ ID NO: 12673 - DNA, 122 bp, Homo sapiens
  misc_feature (61)..(62): /note="This region represents a CpG dinucleotide"
  misc_feature (61)..(61): /note="Nucleotide may be methylated to form 5-methylcytosine"
cccaggccttctctctctggtccttgcagtagcagagttttattctggccttccccgccccgataaagcaaggtgcctcccttccctctgtcaagtttttccgtcagactccctgctcgcag

SEQ ID NO: 12674 - DNA, 122 bp, Homo sapiens
  misc_feature (61)..(62): /note="This region represents a CpG dinucleotide"
  misc_feature (61)..(61): /note="Nucleotide may be methylated to form 5-methylcytosine"
acagtaccatcaggccaaagaggcctctgccaggagacatttctgaagtctgaaggtgtgcgtaggggtagcataaatgccatggttaatttttaacttccccattggtgagtcctgaatca

SEQ ID NO: 12675 - DNA, 122 bp, Homo sapiens
  misc_feature (61)..(62): /note="This region represents a CpG dinucleotide"
  misc_feature (61)..(61): /note="Nucleotide may be methylated to form 5-methylcytosine"
gccccagtccagtccctatcatgagcaactgttggctcactgatgaggtctgaggccttacgagagggatgtaatcagactttaatgagtcagcagggaagagctacggaggtaaattgctc

SEQ ID NO: 12676 - DNA, 122 bp, Homo sapiens
  misc_feature (61)..(62): /note="This region represents a CpG dinucleotide"
  misc_feature (61)..(61): /note="Nucleotide may be methylated to form 5-methylcytosine"
gcaaagctgagagccggagctccaggccatgccatggcctcttatctgggagcctcaccacgcaggtgtccaggtggcctccacccagtgtagacaagccagccatgcttctcgccacctgg

SEQ ID NO: 12677 - DNA, 122 bp, Homo sapiens
  misc_feature (61)..(62): /note="This region represents a CpG dinucleotide"
  misc_feature (61)..(61): /note="Nucleotide may be methylated to form 5-methylcytosine"
acggagacagtgactccaggtgagagctatgctgttcattagtccagccatgcaggaacacggctggcagaagggcaattccgggggcaacgggaagagtccttcttccttatgaaggcaga

SEQ ID NO: 12678 - DNA, 122 bp, Homo sapiens
  misc_feature (61)..(62): /note="This region represents a CpG dinucleotide"
  misc_feature (61)..(61): /note="Nucleotide may be methylated to form 5-methylcytosine"
tttcattccacctgctgacataacagtggaggaatcattttgttgcataagactctgtcacgtcagaggctgaagtgacagcaactaagggaagcaaatcttcccaaagcaggatgtggaga

SEQ ID NO: 12679 - DNA, 122 bp, Homo sapiens
  misc_feature (61)..(62): /note="This region represents a CpG dinucleotide"
  misc_feature (61)..(61): /note="Nucleotide may be methylated to form 5-methylcytosine"
tctttgttacacactcagggtgagcccatttttcctctacttgtttgggtgaagcttcgccgctgtctctgccacaaagctgaccctccagctctgtgacccccttggcagctggcaccagc

SEQ ID NO: 12680 - DNA, 122 bp, Homo sapiens
  misc_feature (61)..(62): /note="This region represents a CpG dinucleotide"
  misc_feature (61)..(61): /note="Nucleotide may be methylated to form 5-methylcytosine"
aaggccagcccaggttcacagggcagagacatagactccacctcgggattgggggcctggcgtggcagtgtcattgttgcaaaggaatttatggccactaaatggtttaccacaggtgactg

SEQ ID NO: 12681 - DNA, 122 bp, Homo sapiens
  misc_feature (61)..(62): /note="This region represents a CpG dinucleotide"
  misc_feature (61)..(61): /note="Nucleotide may be methylated to form 5-methylcytosine"
gagcccactcacatccgctccctggcctcactcactctggaaacgtgtaattacaagtgacgagggctgcagcatgtctttgcattcagagccagtgaagcacagataaccccggagtgaca

SEQ ID NO: 12682 - DNA, 122 bp, Homo sapiens
  misc_feature (61)..(62): /note="This region represents a CpG dinucleotide"
  misc_feature (61)..(61): /note="Nucleotide may be methylated to form 5-methylcytosine"
agggtaagaaattggggttcatgagggtgagttgtctggcctgcggtcacacactgtggtcgtacaggtccttacttcgaaacattgtgagctgactcagataatgagtttataaagcccac

SEQ ID NO: 12683 - DNA, 122 bp, Homo sapiens
  misc_feature (61)..(62): /note="This region represents a CpG dinucleotide"
  misc_feature (61)..(61): /note="Nucleotide may be methylated to form 5-methylcytosine"
tgatgtgagatgataaaatgcctacgtgataagatgcagtgaggtgaatgatgcaggcatcgtgacatagtgttaagctactattgacctacatctgaaggacgatcagctgcttcaggtaa

SEQ ID NO: 12684 - DNA, 122 bp, Homo sapiens
  misc_feature (61)..(62): /note="This region represents a CpG dinucleotide"
  misc_feature (61)..(61): /note="Nucleotide may be methylated to form 5-methylcytosine"
ggtgacttttttgagtcatgttgagttgctcagaagctggcaaggaagaggaaggactgacggggcccattgcacaaggacaggtggaaacccaagttgaaggaaacatggatcaagctgcc

SEQ ID NO: 12685 - DNA, 122 bp, Homo sapiens
  misc_feature (61)..(62): /note="This region represents a CpG dinucleotide"
  misc_feature (61)..(61): /note="Nucleotide may be methylated to form 5-methylcytosine"
tgggctttgatgagatcactctggcgggtgtgtgtaatagattggagggtgtgaagctggcggcagggagtacagttaggaaatgatttcagttatccaattgagaaatgtaaatctctctc

SEQ ID NO: 12686 - DNA, 122 bp, Homo sapiens
  misc_feature (61)..(62): /note="This region represents a CpG dinucleotide"
  misc_feature (61)..(61): /note="Nucleotide may be methylated to form 5-methylcytosine"
catcaccacacacacacagcattggattctgtcctgactcgttttttctaacttcttgggcgaaagggcagattagaattgttccaactcaggcttgtataattcctgcagaaaagacctat

SEQ ID NO: 12687 - DNA, 122 bp, Homo sapiens
  misc_feature (61)..(62): /note="This region represents a CpG dinucleotide"
  misc_feature (61)..(61): /note="Nucleotide may be methylated to form 5-methylcytosine"
ttttcttaacctaggattcctaaggtgtgacacgtatttactatgtgtacagcatttcctcgagccattctgcattaccccctgggactttggaggcaagggggactaatgggaacatataa

SEQ ID NO: 12688 - DNA, 122 bp, Homo sapiens
  misc_feature (61)..(62): /note="This region represents a CpG dinucleotide"
  misc_feature (61)..(61): /note="Nucleotide may be methylated to form 5-methylcytosine"
tgcctccctttcctcacccttcatatagatgatgtataatttatcattcaaaccaggcgacgttggagactcgaagagggagctgtttctccaggacaacaggccaaaccagcactgtctta

SEQ ID NO: 12689 - DNA, 122 bp, Homo sapiens
  misc_feature (61)..(62): /note="This region represents a CpG dinucleotide"
  misc_feature (61)..(61): /note="Nucleotide may be methylated to form 5-methylcytosine"
taaacacaacagctatgtcctgattaaccccagaggcaggaggaggtcagaccaatgctgcgtaattctagttaagccacctaagcagttgaaggaagcttagcctgctgcttcctaaataa

SEQ ID NO: 12690 - DNA, 122 bp, Homo sapiens
  misc_feature (61)..(62): /note="This region represents a CpG dinucleotide"
  misc_feature (61)..(61): /note="Nucleotide may be methylated to form 5-methylcytosine"
caaagctctttattggaagttattcacaaatcttcatgatggtttttggacgactagtcacgtgtggtgttgccctatttcaaatgagtcagagaaattgtgctttatatgaattcatgcat

SEQ ID NO: 12691 - DNA, 122 bp, Homo sapiens
  misc_feature (61)..(62): /note="This region represents a CpG dinucleotide"
  misc_feature (61)..(61): /note="Nucleotide may be methylated to form 5-methylcytosine"
ggaattacaggcgtgagccaccatgcctggctatacttcttagcttacttttttattacgcgtatatattaagaacttttaaaagtccaaattaaagaagcatgcctagacatcattaaaat

SEQ ID NO: 12692 - DNA, 122 bp, Homo sapiens
  misc_feature (61)..(62): /note="This region represents a CpG dinucleotide"
  misc_feature (61)..(61): /note="Nucleotide may be methylated to form 5-methylcytosine"
agtcatgataacatgtaggatgcttagggtaaactctaaactcacaatcactaagggcaacgcaacagagaaagtgatttgggaagacagcagcaacaagagacctccataaagaaggctct

SEQ ID NO: 12693 - DNA, 122 bp, Homo sapiens
  misc_feature (61)..(62): /note="This region represents a CpG dinucleotide"
  misc_feature (61)..(61): /note="Nucleotide may be methylated to form 5-methylcytosine"
tgtacgacgacagtggatctgatcaccgagacggctgctgagtaactaacgagtggggcgcgtctacactgtggaggtgctggacagagggaggagtcgcctcctgggctggtcggagtagg

SEQ ID NO: 12694 - DNA, 122 bp, Homo sapiens
  misc_feature (61)..(62): /note="This region represents a CpG dinucleotide"
  misc_feature (61)..(61): /note="Nucleotide may be methylated to form 5-methylcytosine"
gttgaaactttatttcctccttatgaatcaactatcttattaggagtgattgaaattatacgaagtttgttcttcactggtgtgcaggcttatactgtaattgccttttaagtatttaaagt

SEQ ID NO: 12695 - DNA, 122 bp, Homo sapiens
  misc_feature (61)..(62): /note="This region represents a CpG dinucleotide"
  misc_feature (61)..(61): /note="Nucleotide may be methylated to form 5-methylcytosine"
cagtgaataaaacagattccataaatgcaggactagggttatttcacttgtcttcctgctcgcactctgcatactggctgactcacccacctttcagctctcatcctcagagctgacttcca

SEQ ID NO: 12696 - DNA, 122 bp, Homo sapiens
  misc_feature (61)..(62): /note="This region represents a CpG dinucleotide"
  misc_feature (61)..(61): /note="Nucleotide may be methylated to form 5-methylcytosine"
agtgttttcacctattttatattccttttgagctttgtctagagagattacatgtgctaccgactggtataagaggtggtgtgaagcaatgtatgccttttaacaacagttttgccaaaagg

SEQ ID NO: 12697 - DNA, 122 bp, Homo sapiens
  misc_feature (61)..(62): /note="This region represents a CpG dinucleotide"
  misc_feature (61)..(61): /note="Nucleotide may be methylated to form 5-methylcytosine"
tcatctctagcctgtttgctccccttggagtgacactgacatgctttcttgccagctaatcgggaggtgtttctgatggtgccccaggtgccctatgtctgacctgcagaagctgcagaacc

SEQ ID NO: 12698 - DNA, 122 bp, Homo sapiens
  misc_feature (61)..(62): /note="This region represents a CpG dinucleotide"
  misc_feature (61)..(61): /note="Nucleotide may be methylated to form 5-methylcytosine"
tcttaatagtttgcccagacagctcaccttcagtaccccagagcctccagcctggcagtccgggctccaggtacctctagagggctgtggcgcacactatgcataagtcacagggacactgg

SEQ ID NO: 12699 - DNA, 122 bp, Homo sapiens
  misc_feature (61)..(62): /note="This region represents a CpG dinucleotide"
  misc_feature (61)..(61): /note="Nucleotide may be methylated to form 5-methylcytosine"
ccaccctaatccaggatgatcgtatctcagtactgtcaacttaattacatctgcaaagaccgtttatccgttttttttttttttggagatgaagtctcactctttttgcccaggctggagtg

SEQ ID NO: 12700 - DNA, 122 bp, Homo sapiens
  misc_feature (61)..(62): /note="This region represents a CpG dinucleotide"
  misc_feature (61)..(61): /note="Nucleotide may be methylated to form 5-methylcytosine"
tctctacaggtcagggaagtcaaagatgcatccctgagttcttcctagcaggcaagcagccgtgcaccaatgacatggccaaaagcaattctgttggccaggacagctgtcaggactctgag

SEQ ID NO: 12701 - DNA, 122 bp, Homo sapiens
  misc_feature (61)..(62): /note="This region represents a CpG dinucleotide"
  misc_feature (61)..(61): /note="Nucleotide may be methylated to form 5-methylcytosine"
agtagtcaccatgctaaaattaaactagcagtgtctcaatacaaagcacaacaattaatccgcaggcaaagtggatggtcacgttcaagattatagcgcgcttaagttacatcacaaggagt

SEQ ID NO: 12702 - DNA, 122 bp, Homo sapiens
  misc_feature (61)..(62): /note="This region represents a CpG dinucleotide"
  misc_feature (61)..(61): /note="Nucleotide may be methylated to form 5-methylcytosine"
ctctgcctgacaggctttgcagcatctcagcacatggcactgggtgagcttggagtttgccgctcacctggattagcgtcgtggcaggtgcggccgtggcaggtgtcgactgcattaaaccc

SEQ ID NO: 12703 - DNA, 122 bp, Homo sapiens
  misc_feature (61)..(62): /note="This region represents a CpG dinucleotide"
  misc_feature (61)..(61): /note="Nucleotide may be methylated to form 5-methylcytosine"
ttttaaagagagcagggttacgagccagagtggtgggatgagcagttctggtgggaaagacggttacagaacaaatgactaaatgtgactcaggtcagaacaggtgaccaagggtgactcag

SEQ ID NO: 12704 - DNA, 122 bp, Homo sapiens
  misc_feature (61)..(62): /note="This region represents a CpG dinucleotide"
  misc_feature (61)..(61): /note="Nucleotide may be methylated to form 5-methylcytosine"
agcaatccaacttttatttattgaacttctcctcatacaaggccttgggctgggtgttgacggatgggaaggttccactttctctactcagagaattcattgcgcccagctctgtgccaatt

SEQ ID NO: 12705 - DNA, 122 bp, Homo sapiens
  misc_feature (61)..(62): /note="This region represents a CpG dinucleotide"
  misc_feature (61)..(61): /note="Nucleotide may be methylated to form 5-methylcytosine"
tggatgaaactcagtgaggttcattcagaccgtgaatcactggcagacctgctagtccagcgcagatgacatgacctctggtgttacctaagagggatatgttttgcttaatcatgaactat

SEQ ID NO: 12706 - DNA, 122 bp, Homo sapiens
  misc_feature (61)..(62): /note="This region represents a CpG dinucleotide"
  misc_feature (61)..(61): /note="Nucleotide may be methylated to form 5-methylcytosine"
attccacaatgtttggctcctagtagcttttcagcaagtaattgcttaactgactttccccgctacagaagacgatgcttttcaagaatagacaattccatgtcacagatagtgtaggtgtg

SEQ ID NO: 12707 - DNA, 122 bp, Homo sapiens
  misc_feature (61)..(62): /note="This region represents a CpG dinucleotide"
  misc_feature (61)..(61): /note="Nucleotide may be methylated to form 5-methylcytosine"
gcttcagccctatctcaaagctgcaactctgcctcctggcatggctaatcctgctgggcacggccttcctcaggctgcagcaggcaggccaactttctcctctccctggacctgggtaagat

SEQ ID NO: 12708 - DNA, 122 bp, Homo sapiens
  misc_feature (61)..(62): /note="This region represents a CpG dinucleotide"
  misc_feature (61)..(61): /note="Nucleotide may be methylated to form 5-methylcytosine"
cctgtctgcttgaggtaccgtgcccgctctttgccttggcagactccatctccagggtggcgtcttattaatgttcccagtgttgctgactcaggcatcacaggccagggccttcagtgaca

SEQ ID NO: 12709 - DNA, 122 bp, Homo sapiens
  misc_feature (61)..(62): /note="This region represents a CpG dinucleotide"
  misc_feature (61)..(61): /note="Nucleotide may be methylated to form 5-methylcytosine"
ttgcattattgtctaggttataagtttgttgctgagatcattgaatgctgtggtagcaaacgtctcataagagcatgaaatggtttttagcagcagcctcgaagctactggatgtatataga

SEQ ID NO: 12710 - DNA, 122 bp, Homo sapiens
  misc_feature (61)..(62): /note="This region represents a CpG dinucleotide"
  misc_feature (61)..(61): /note="Nucleotide may be methylated to form 5-methylcytosine"
gatgctgagcagctccatccagcagagccacaaccggctcctgaagctggaaggagacagcgtctggctccacaccctgctcatcaaccagagtgaccagcaacgtctgcaggcaaggtccc

SEQ ID NO: 12711 - DNA, 122 bp, Homo sapiens
  misc_feature (61)..(62): /note="This region represents a CpG dinucleotide"
  misc_feature (61)..(61): /note="Nucleotide may be methylated to form 5-methylcytosine"
agggttgctgcatttgggtgaggatgaggaagcattaattcccctgtacttctggcttgacggtgctgaggcagaatagaatccagtgactaaaggtcctaagacattaggagtcaggagtc

SEQ ID NO: 12712 - DNA, 122 bp, Homo sapiens
  misc_feature (61)..(62): /note="This region represents a CpG dinucleotide"
  misc_feature (61)..(61): /note="Nucleotide may be methylated to form 5-methylcytosine"
atcatctgggggccctttctgggtaggaacctgtccagtgagaggatgtcactcagcagccgcttccctcttccaatctgtgtcccgggagccaggcgttctgagaggaggaaggcagtttc

SEQ ID NO: 12713 - DNA, 122 bp, Homo sapiens
  misc_feature (61)..(62): /note="This region represents a CpG dinucleotide"
  misc_feature (61)..(61): /note="Nucleotide may be methylated to form 5-methylcytosine"
ggttttagagacttacccaacaccttcctgccctcaggagttcaccagagggaagagcaacgcaatccagacttcacccgggaatagttgtgtggctttggccgagatgtttctcctccctg

SEQ ID NO: 12714 - DNA, 122 bp, Homo sapiens
  misc_feature (61)..(62): /note="This region represents a CpG dinucleotide"
  misc_feature (61)..(61): /note="Nucleotide may be methylated to form 5-methylcytosine"
taggttttatgtttatgtccctttttcttgctgagtttatgacagtgttacttctattaacgaagagtagttgtgtgaattgctgcccccttggggcttatattccactttagatctttaat

SEQ ID NO: 12715 - DNA, 122 bp, Homo sapiens
  misc_feature (61)..(62): /note="This region represents a CpG dinucleotide"
  misc_feature (61)..(61): /note="Nucleotide may be methylated to form 5-methylcytosine"
ggatgtgcagggcaaagtctgggaggtttccatgtgcaaagctttccctgtcctcagggacgcatcaccctccgagctctgaggtgggacgctcctcagggtactgccagccaggggcgctc

SEQ ID NO: 12716 - DNA, 122 bp, Homo sapiens
  misc_feature (61)..(62): /note="This region represents a CpG dinucleotide"
  misc_feature (61)..(61): /note="Nucleotide may be methylated to form 5-methylcytosine"
ttctatttgccagagtgggggagggagtggtaaggcaggttgactgggatagaccagtcacgaaggagctggaacattcacccaggccaattgccatgtgacttgtagaaggtctgtgggga

SEQ ID NO: 12717 - DNA, 122 bp, Homo sapiens
  misc_feature (61)..(62): /note="This region represents a CpG dinucleotide"
  misc_feature (61)..(61): /note="Nucleotide may be methylated to form 5-methylcytosine"
gaactgctgcatgactgcactgcatgcgtcgcatacacagggtaggtgccaagtgagtgtcgtccaccttagaagaccagtctcaagagaggattcagcccactggggacagttggctgatg

SEQ ID NO: 12718 - DNA, 122 bp, Homo sapiens
  misc_feature (61)..(62): /note="This region represents a CpG dinucleotide"
  misc_feature (61)..(61): /note="Nucleotide may be methylated to form 5-methylcytosine"
ttgaagtggtgatgttgatgcttctgaggagatagtattttctcccagccccgacaactgcgcttgcagagatcaagcctgacccagagatagtgtctcacagctttttggctgtattcatt

SEQ ID NO: 12719 - DNA, 122 bp, Homo sapiens
  misc_feature (61)..(62): /note="This region represents a CpG dinucleotide"
  misc_feature (61)..(61): /note="Nucleotide may be methylated to form 5-methylcytosine"
tctagccatagtccactgccatacaaataagaggctaactttaagaaattcaattaaagccgggtgcggtctctcatgcttgtaatcccagcactttgggaggctgaggcaggcagatcacc

SEQ ID NO: 12720 - DNA, 122 bp, Homo sapiens
  misc_feature (61)..(62): /note="This region represents a CpG dinucleotide"
  misc_feature (61)..(61): /note="Nucleotide may be methylated to form 5-methylcytosine"
gacaagccagctctctgtagaacatgctggactccaagttccctgatcaggctgtggtcacgcaggcctttgtacctttgctctagcttctgtctgggtttggaatgtactctcccctcctt

SEQ ID NO: 12721 - DNA, 122 bp, Homo sapiens
  misc_feature (61)..(62): /note="This region represents a CpG dinucleotide"
  misc_feature (61)..(61): /note="Nucleotide may be methylated to form 5-methylcytosine"
gtctggatggtttacacagacacggtgagagacgttacccggacgcaaaagagtacacagcgtgtgataccgttccatgtacagtcatacgttgcttaacgacgggctgtgttctgagaaat

SEQ ID NO: 12722 - DNA, 122 bp, Homo sapiens
  misc_feature (61)..(62): /note="This region represents a CpG dinucleotide"
  misc_feature (61)..(61): /note="Nucleotide may be methylated to form 5-methylcytosine"
tgctctgccctggtacctgggaccagggccatgcaccattgctttagagaacacctgctccgacccaggtcctgcaccagggatttcccaccagctgaatcagacacagttgctgtcctcag

SEQ ID NO: 12723 - DNA, 122 bp, Homo sapiens
  misc_feature (61)..(62): /note="This region represents a CpG dinucleotide"
  misc_feature (61)..(61): /note="Nucleotide may be methylated to form 5-methylcytosine"
taacatccatctccttgtaatgtgtgcatcgttttatcacactggagattaagttcctctcgtaaaggcctttacatttttgagactcacttttaacagagctctttccaaagcactattgt

SEQ ID NO: 12724 - DNA, 122 bp, Homo sapiens
  misc_feature (61)..(62): /note="This region represents a CpG dinucleotide"
  misc_feature (61)..(61): /note="Nucleotide may be methylated to form 5-methylcytosine"
tgttacagatggagaagatgactcagagtgggtccagaattcacccattgtcatactgtccgtaaaaggcagaagagatcagtgctcctattaaaagaccagatcacaggattcaaatttgc

SEQ ID NO: 12725 - DNA, 122 bp, Homo sapiens
  misc_feature (61)..(62): /note="This region represents a CpG dinucleotide"
  misc_feature (61)..(61): /note="Nucleotide may be methylated to form 5-methylcytosine"
tatgcacagttaagccatcatattcttgcaacaactgtatcaagtaggcactaatgtcagcgatagcaatggatgcagcatttcacatcaaggaaaccaaggcaaagagagattaagtagct

SEQ ID NO: 12726 - DNA, 122 bp, Homo sapiens
  misc_feature (61)..(62): /note="This region represents a CpG dinucleotide"
  misc_feature (61)..(61): /note="Nucleotide may be methylated to form 5-methylcytosine"
tggaataacagagagaggattaggcagaaagctgggtttgtcagggtgggactgattacacgtagcctttcataggctttaggaagttgttatttcagaaataattggtgtgtgttgagttt

SEQ ID NO: 12727 - DNA, 122 bp, Homo sapiens
  misc_feature (61)..(62): /note="This region represents a CpG dinucleotide"
  misc_feature (61)..(61): /note="Nucleotide may be methylated to form 5-methylcytosine"
ctaagggtacgacctgctgggagaatcatccatctatcttctaagtgctaattgagtgcacgcctttcttacctctgagtgttaaagctttgtcaggaaacgtggcaacatctcaggctgaa

SEQ ID NO: 12728 - DNA, 122 bp, Homo sapiens
  misc_feature (61)..(62): /note="This region represents a CpG dinucleotide"
  misc_feature (61)..(61): /note="Nucleotide may be methylated to form 5-methylcytosine"
taggattagatccctggggaaggaacaagatacactaaagtggggctgtgccccagttaccgttctatgaggacacagggtaggaacagtttgacaagcacttcaagaatttacactgtcac

SEQ ID NO: 12729 - DNA, 122 bp, Homo sapiens
  misc_feature (61)..(62): /note="This region represents a CpG dinucleotide"
  misc_feature (61)..(61): /note="Nucleotide may be methylated to form 5-methylcytosine"
ccatcgtgcctgacccgaatcactattctatgctaatatgactatgactgttcagctgaccgagaattcatcaagttgcataatgatatactgacacatccttatcctagtcacatagctag

SEQ ID NO: 12730 - DNA, 122 bp, Homo sapiens
  misc_feature (61)..(62): /note="This region represents a CpG dinucleotide"
  misc_feature (61)..(61): /note="Nucleotide may be methylated to form 5-methylcytosine"
ctgtccctctctgaggccaagtttctatggggactcttggaaccatctcttctctgcttacgtggcttctcccttttctctcccaaagttttaacccccaatcctctctcttgttatttgta

SEQ ID NO: 12731 - DNA, 122 bp, Homo sapiens
  misc_feature (61)..(62): /note="This region represents a CpG dinucleotide"
  misc_feature (61)..(61): /note="Nucleotide may be methylated to form 5-methylcytosine"
gaggctagggctaagtgacctgccactcctctctaggcctggagagggacatgtgtactacgtgtactcaggctcagtcctgaaacacgaggactgaagtgttacatggcctgtttctggtt

SEQ ID NO: 12732 - DNA, 122 bp, Homo sapiens
  misc_feature (61)..(62): /note="This region represents a CpG dinucleotide"
  misc_feature (61)..(61): /note="Nucleotide may be methylated to form 5-methylcytosine"
tcgttttcccagcggaattttaactattctaaggatgtccttacagccagttccccactccgctactcagagtgtgtcagactttaccctgtccattcaactccagaaaaaccgggaggtct

SEQ ID NO: 12733 - DNA, 122 bp, Homo sapiens
  misc_feature (61)..(62): /note="This region represents a CpG dinucleotide"
  misc_feature (61)..(61): /note="Nucleotide may be methylated to form 5-methylcytosine"
ctgcctgcctccttctactgatctgtcagctccgatctgactcaaggaccaaggcttagtcgtccttctacctgctcgggttcttgcacaagaataaacaaatcgataaaaaccctggattg

SEQ ID NO: 12734 - DNA, 122 bp, Homo sapiens
  misc_feature (61)..(62): /note="This region represents a CpG dinucleotide"
  misc_feature (61)..(61): /note="Nucleotide may be methylated to form 5-methylcytosine"
cttttgaatgttactattttacatagtatatgaaaatcccaacactgtcagctaccctgtcgcttttcaaatagggagtatgtatgtgtgtttatgactagtgttgggatgtggctggttta

SEQ ID NO: 12735 - DNA, 122 bp, Homo sapiens
  misc_feature (61)..(62): /note="This region represents a CpG dinucleotide"
  misc_feature (61)..(61): /note="Nucleotide may be methylated to form 5-methylcytosine"
gacttctgccagagctgcacatgtagttgaagaagaccagaataaggaagacagagccagcgccccagaccaggatgctgagtgcagcccacagcaacatagcagaaacttcctgggcctgc

SEQ ID NO: 12736 - DNA, 122 bp, Homo sapiens
  misc_feature (61)..(62): /note="This region represents a CpG dinucleotide"
  misc_feature (61)..(61): /note="Nucleotide may be methylated to form 5-methylcytosine"
agaaagagaggtgatactcccaggacttatggtcagtccagtggtgttacttactgaccacgtggctctgggtatgccatttaagggctctaaccttgtgtcttcaattctgtgaagggcta

SEQ ID NO: 12737 - DNA, 122 bp, Homo sapiens
  misc_feature (61)..(62): /note="This region represents a CpG dinucleotide"
  misc_feature (61)..(61): /note="Nucleotide may be methylated to form 5-methylcytosine"
gtgactcttgggtcaagttgggctgcctcaccctgtccaagtctgggtggaccaaggccacgtagtcattgcaggtggtgacattgcccaaggctgagagccgctcctccacccgcctaatc

SEQ ID NO: 12738 - DNA, 122 bp, Homo sapiens
  misc_feature (61)..(62): /note="This region represents a CpG dinucleotide"
  misc_feature (61)..(61): /note="Nucleotide may be methylated to form 5-methylcytosine"
ggatagaagcatttgaggacagctgctccaaagccttatgtgtatgatgaaacttaaccacggggaagagactcttcagtagcctgttctgtctggtgatttttattttaagtgaacctttg

SEQ ID NO: 12739 - DNA, 122 bp, Homo sapiens
  misc_feature (61)..(62): /note="This region represents a CpG dinucleotide"
  misc_feature (61)..(61): /note="Nucleotide may be methylated to form 5-methylcytosine"
gcggacactccccagtgtttgagtgatgtttacgtggaagcctggcgtgtaggaagctggcgcccctgggggaactgcaaggccattttacagcattcacctgtcaccgtgtccttcagaac

SEQ ID NO: 12740 - DNA, 122 bp, Homo sapiens
  misc_feature (61)..(62): /note="This region represents a CpG dinucleotide"
  misc_feature (61)..(61): /note="Nucleotide may be methylated to form 5-methylcytosine"
agagaagaaaccaactccgtgcctgagggcagctgttgagtgccaggccatggaagttcccgcatcagggagagccaggttaggtgggcaaacagcagcctcagcacctggtagtaagctaa

SEQ ID NO: 12741 - DNA, 122 bp, Homo sapiens
  misc_feature (61)..(62): /note="This region represents a CpG dinucleotide"
  misc_feature (61)..(61): /note="Nucleotide may be methylated to form 5-methylcytosine"
ttctgagctttaatcctctgtgccagataatttcagactcaaaccttttctagtcctctgcgattcttctcagccatcaggcactgcctacaatacgtaagaggcagcaaaagatacttgga

SEQ ID NO: 12742 - DNA, 122 bp, Homo sapiens
  misc_feature (61)..(62): /note="This region represents a CpG dinucleotide"
  misc_feature (61)..(61): /note="Nucleotide may be methylated to form 5-methylcytosine"
tagccgtttgttcatctaccaaacatttgccaaagaggcctttaaaaatttattacaggccgggtgtggtggctcatgcctgtaatcctagcactttaggaggccgaggcgggtagattgcc

SEQ ID NO: 12743 - DNA, 122 bp, Homo sapiens
  misc_feature (61)..(62): /note="This region represents a CpG dinucleotide"
  misc_feature (61)..(61): /note="Nucleotide may be methylated to form 5-methylcytosine"
tgatgtgatacaaccagaaaactgcatgggttggcacacaatgagagactcctggggacacgtccctaaaagtagctccaaggcaggaattaaaaatggttctggaagcttttgagcaactg

SEQ ID NO: 12744 - DNA, 122 bp, Homo sapiens
  misc_feature (61)..(62): /note="This region represents a CpG dinucleotide"
  misc_feature (61)..(61): /note="Nucleotide may be methylated to form 5-methylcytosine"
ctgcaagtgaaaaagtaggtcagcagaaactagtcagaggttggtggcttaaaggtcgaacgtgtctcttcagaatagtgaggtgagtgctcaatgtcttttcaaaggacgcttcaaaggca

SEQ ID NO: 12745 - DNA, 122 bp, Homo sapiens
  misc_feature (61)..(62): /note="This region represents a CpG dinucleotide"
  misc_feature (61)..(61): /note="Nucleotide may be methylated to form 5-methylcytosine"
tgggggaggctggcccatgccaggaaggcatcagggcaggacagcagcctggcaagaagacgtgagtggctctgtacagggggatcaaactagtacattaaaatatgtaggacagtgggagt

SEQ ID NO: 12746 - DNA, 122 bp, Homo sapiens
  misc_feature (61)..(62): /note="This region represents a CpG dinucleotide"
  misc_feature (61)..(61): /note="Nucleotide may be methylated to form 5-methylcytosine"
ggtatggctaaagttgctgtccacaggtggaattatttcttctctctaggaagcccctgtcgcacttaaagtcagctgattatggatttttattacttgtatgatgccttcacagcaacgcc

SEQ ID NO: 12747 - DNA, 122 bp, Homo sapiens
  misc_feature (61)..(62): /note="This region represents a CpG dinucleotide"
  misc_feature (61)..(61): /note="Nucleotide may be methylated to form 5-methylcytosine"
aggagtgaggatgaaacatgccacacacagccccacccttaccccaagactcctccctgacgttatagtaggaggtcaagtatttgctacagggttggatgtcatacttaatgctgatggct

SEQ ID NO: 12748 - DNA, 122 bp, Homo sapiens
  misc_feature (61)..(62): /note="This region represents a CpG dinucleotide"
  misc_feature (61)..(61): /note="Nucleotide may be methylated to form 5-methylcytosine"
gttgtcttgcttaagtccaagcctgactcagaattggtgtcactgtctgtgtcaggctctcgttccctcttgtgccttttgtcctgtggttccatgatgccaccacaaaccttctctgatga

SEQ ID NO: 12749 - DNA, 122 bp, Homo sapiens
  misc_feature (61)..(62): /note="This region represents a CpG dinucleotide"
  misc_feature (61)..(61): /note="Nucleotide may be methylated to form 5-methylcytosine"
tggagagccagctcggccaccgccgtttctgggctgcccaggccagcaggctcacagtgacggagctcagccacccccgtttctgggctgcccaggccagcaggctcacagtgacggagctc

SEQ ID NO: 12750 - DNA, 122 bp, Homo sapiens
  misc_feature (61)..(62): /note="This region represents a CpG dinucleotide"
  misc_feature (61)..(61): /note="Nucleotide may be methylated to form 5-methylcytosine"
ggaatactatattagcgactcataaagagcatctccagttttgttcttttgcttctctgacgatagttttggtaggttagacctcaggaagaactaaagtagatactgcttttttctttgct

SEQ ID NO: 12751 - DNA, 122 bp, Homo sapiens
  misc_feature (61)..(62): /note="This region represents a CpG dinucleotide"
  misc_feature (61)..(61): /note="Nucleotide may be methylated to form 5-methylcytosine"
gagtcctctcccaatggaatcacacaggatgcacttaattcccctagcagtgatttgttacgacatgtgaatgagttgtctactggacaaggtcactacagactcagtgcccaaagttttta

SEQ ID NO: 12752 - DNA, 122 bp, Homo sapiens
  misc_feature (61)..(62): /note="This region represents a CpG dinucleotide"
  misc_feature (61)..(61): /note="Nucleotide may be methylated to form 5-methylcytosine"
gaacagagcatgtgtggttcatgggactcactccagcagtgatgatacaatgctgctgcccgttcagtactgtgcctctacttaaccaaagctcctggaggacaggaactgtatctgactca

SEQ ID NO: 12753 - DNA, 122 bp, Homo sapiens
  misc_feature (61)..(62): /note="This region represents a CpG dinucleotide"
  misc_feature (61)..(61): /note="Nucleotide may be methylated to form 5-methylcytosine"
cacacgcagcaacactggtaatactgcttcccatattcattctttggtcttcactgacagcgtgaagaagcaactattgctgattcatcagttactcattttcacaatggtcagtactccaa

SEQ ID NO: 12754 - DNA, 122 bp, Homo sapiens
  misc_feature (61)..(62): /note="This region represents a CpG dinucleotide"
  misc_feature (61)..(61): /note="Nucleotide may be methylated to form 5-methylcytosine"
tatcaaaggttaaacccacacagtggccagttaatttcacactaaagaaaaacttctggtcgggtgaggtggctcacgcctgtaatcccagcattttgggaggcttaggcgggcagatcact

SEQ ID NO: 12755 - DNA, 122 bp, Homo sapiens
  misc_feature (61)..(62): /note="This region represents a CpG dinucleotide"
  misc_feature (61)..(61): /note="Nucleotide may be methylated to form 5-methylcytosine"
tcataaattaggtcacattctccctggaggaaatccaaggaggcaaagtagtcgggtggccgtgagggtgcagtgtcacaggtaaggctggtccgaggacagctcccacctctttatgggag

SEQ ID NO: 12756 - DNA, 122 bp, Homo sapiens
  misc_feature (61)..(62): /note="This region represents a CpG dinucleotide"
  misc_feature (61)..(61): /note="Nucleotide may be methylated to form 5-methylcytosine"
gtagtcctgatctctgctagtgagtcaagcacactgcatctgaacataagtcatgcagggcgtgacaattgcctcttattactcagcacccctgccagcttgaacccatgctcaggcggggg

SEQ ID NO: 12757 - DNA, 122 bp, Homo sapiens
  misc_feature (61)..(62): /note="This region represents a CpG dinucleotide"
  misc_feature (61)..(61): /note="Nucleotide may be methylated to form 5-methylcytosine"
cccattcattggccagtctaggcctgcgtgctcaaggtcacatggctagttgggtccagtcggggtttgaggatggcagggtgacacccaaccactgcctcaagcaatgagtgcctcacagg

SEQ ID NO: 12758 - DNA, 122 bp, Homo sapiens
  misc_feature (61)..(62): /note="This region represents a CpG dinucleotide"
  misc_feature (61)..(61): /note="Nucleotide may be methylated to form 5-methylcytosine"
gttctccagcaggcgctgcaagggctggcctgcctgctgcctctgtgcatgaagctgctgcgtccaggaaaactgagatgacctggactgctggttgtttctacctgtgaatcaccccagag

SEQ ID NO: 12759 - DNA, 122 bp, Homo sapiens
  misc_feature (61)..(62): /note="This region represents a CpG dinucleotide"
  misc_feature (61)..(61): /note="Nucleotide may be methylated to form 5-methylcytosine"
catctccacctggaaagactggaaaggctacacaccagagctcaaatttgaaatacatctcgaacaaggatttggccatgccaagacagttgagtggaaggaagtacattctaggcaaagaa

SEQ ID NO: 12760 - DNA, 122 bp, Homo sapiens
  misc_feature (61)..(62): /note="This region represents a CpG dinucleotide"
  misc_feature (61)..(61): /note="Nucleotide may be methylated to form 5-methylcytosine"
acattcagttgctttggaaatgcatctaagagcagcattcaatttcaactgccaactgctcgtaatagctggattagacagatcattcttctcacctattgtttccctttacaaagatatat

SEQ ID NO: 12761 - DNA, 122 bp, Homo sapiens
  misc_feature (61)..(62): /note="This region represents a CpG dinucleotide"
  misc_feature (61)..(61): /note="Nucleotide may be methylated to form 5-methylcytosine"
gggagtggaatagtcatctcttgaaaatagagatttcaatgtgcgattaatcttgtaaggcgacttagtttgggattcccagaagcagattctgagatgaagattcttgagcgagtgattta

SEQ ID NO: 12762 - DNA, 122 bp, Homo sapiens
  misc_feature (61)..(62): /note="This region represents a CpG dinucleotide"
  misc_feature (61)..(61): /note="Nucleotide may be methylated to form 5-methylcytosine"
taggtcattttcactgctgtagtcccagttcctacaacagtgcccaggacacaccaggaacgtgacatttattgaatagatgaaagaacagtgtaaaaaccacattgctcttcactctgcct

SEQ ID NO: 12763 - DNA, 122 bp, Homo sapiens
  misc_feature (61)..(62): /note="This region represents a CpG dinucleotide"
  misc_feature (61)..(61): /note="Nucleotide may be methylated to form 5-methylcytosine"
ctgcatgtctcacacagatcccagcctcaccctggcccacatctgcaactgagtgctggacgccttcccttgggcacaccccagcacagacttgtctcatgtgggttatccccatggtcccc

SEQ ID NO: 12764 - DNA, 122 bp, Homo sapiens
  misc_feature (61)..(62): /note="This region represents a CpG dinucleotide"
  misc_feature (61)..(61): /note="Nucleotide may be methylated to form 5-methylcytosine"
atgatgaggcatatcaggaactatgtaatcttgtaatacttctgctgcaaaacctcctgacgttctgaatgaacagtcacatgcagcctcttcagtgcaaaactgagctcataagaaagtaa

SEQ ID NO: 12765 - DNA, 122 bp, Homo sapiens
  misc_feature (61)..(62): /note="This region represents a CpG dinucleotide"
  misc_feature (61)..(61): /note="Nucleotide may be methylated to form 5-methylcytosine"
tacatacatatatgcaccaaatagcagagttctaatgtattattcaccctgctccccagacgttattccatgagagcaagaactggatctggcttgcttactgctttgttctcataccaggc

SEQ ID NO: 12766 - DNA, 122 bp, Homo sapiens
  misc_feature (61)..(62): /note="This region represents a CpG dinucleotide"
  misc_feature (61)..(61): /note="Nucleotide may be methylated to form 5-methylcytosine"
ttagtcaggtaggcagaactctaatcaggaattgaaataaagcattagtattgtgataagcgaagaacagaggcctatgagaacatagagcagggagttcttaaactgatctacgatctaga

SEQ ID NO: 12767 - DNA, 122 bp, Homo sapiens
  misc_feature (61)..(62): /note="This region represents a CpG dinucleotide"
  misc_feature (61)..(61): /note="Nucleotide may be methylated to form 5-methylcytosine"
tgcctctaaagctcttggttttatcagctcacccaaactgaagatgaaacactggctcctcgtgatgctgttgcaacacagatgtgtcaccaggtccccaagatgatatgttaagatggctc

SEQ ID NO: 12768 - DNA, 122 bp, Homo sapiens
  misc_feature (61)..(62): /note="This region represents a CpG dinucleotide"
  misc_feature (61)..(61): /note="Nucleotide may be methylated to form 5-methylcytosine"
agtctttactactgcaccttacaggcttggctaagtcatttccagtctgcaccaaggctccgtttccagcagccccagctggtatttctacatggcaccctgtgtgactgccacctgtggct

SEQ ID NO: 12769 - DNA, 122 bp, Homo sapiens
  misc_feature (61)..(62): /note="This region represents a CpG dinucleotide"
  misc_feature (61)..(61): /note="Nucleotide may be methylated to form 5-methylcytosine"
ttcaggctggatactttccaggataagtcctacttgggatctgctttcattaatcctttgcgttaagtaatcatatttttgcaagcgtcttgtggtagctctaccaaatgctcctccaaacc

SEQ ID NO: 12770 - DNA, 122 bp, Homo sapiens
  misc_feature (61)..(62): /note="This region represents a CpG dinucleotide"
  misc_feature (61)..(61): /note="Nucleotide may be methylated to form 5-methylcytosine"
ctctaataaacaacatacacaaaccactttctctctagatctctaggggtggggctcaggcgttagtatttttaaaaactccctgggtgacattaatgtgttgccaggcttcagaatcactg

SEQ ID NO: 12771 - DNA, 122 bp, Homo sapiens
  misc_feature (61)..(62): /note="This region represents a CpG dinucleotide"
  misc_feature (61)..(61): /note="Nucleotide may be methylated to form 5-methylcytosine"
ctctcaacagaaattgcagaggagtgggagatgggaggagagagggagaaaggccagagacgaagttgaaactagtgcttctagctgtttcagtcacaaactttaaggctttgaaggataaa

SEQ ID NO: 12772 - DNA, 122 bp, Homo sapiens
  misc_feature (61)..(62): /note="This region represents a CpG dinucleotide"
  misc_feature (61)..(61): /note="Nucleotide may be methylated to form 5-methylcytosine"
tagctggtcatgatacttgcatcagattctcagaaggttgggcaacttcaaaaacaaagtcggagcctgggcaatatcctgagtcctcatctctacaaaaaatgtttaaaaagttatttggg

SEQ ID NO: 12773 - DNA, 122 bp, Homo sapiens
  misc_feature (61)..(62): /note="This region represents a CpG dinucleotide"
  misc_feature (61)..(61): /note="Nucleotide may be methylated to form 5-methylcytosine"
atagacttggactagttactccacctcgctgtgactcaatgtccttttctgtaaatggggcgttgcggcccaggggctgtggtcagatgaagctgcttagagcacatggagtgcttggaggg

SEQ ID NO: 12774 - DNA, 122 bp, Homo sapiens
  misc_feature (61)..(62): /note="This region represents a CpG dinucleotide"
  misc_feature (61)..(61): /note="Nucleotide may be methylated to form 5-methylcytosine"
ttcactttcaaacctgtccacgttgtttccctgtcagagccaatgtttgcttacaagtctcgtctcatcagtacgagaaaggcaatccttaacttttacctaaccccggagaaagtttcatt

SEQ ID NO: 12775 - DNA, 122 bp, Homo sapiens
  misc_feature (61)..(62): /note="This region represents a CpG dinucleotide"
  misc_feature (61)..(61): /note="Nucleotide may be methylated to form 5-methylcytosine"
gtgtctctccttagcacataagaccctgtccgaggactgtggcatgacgtgctggagtcacgattctgtcacccagtcaggtcatcagtgtcagagagctaggtggccaggttggagttgat

SEQ ID NO: 12776 - DNA, 122 bp, Homo sapiens
  misc_feature (61)..(62): /note="This region represents a CpG dinucleotide"
  misc_feature (61)..(61): /note="Nucleotide may be methylated to form 5-methylcytosine"
tgtggttcaaccaggcaagatcatccggtgaaagaaccagtccctgggccccaaggatgccggggaaacaggaccttctcctttcctggagctggtttagctggatatgggagggggtttgg

SEQ ID NO: 12777 - DNA, 122 bp, Homo sapiens
  misc_feature (61)..(62): /note="This region represents a CpG dinucleotide"
  misc_feature (61)..(61): /note="Nucleotide may be methylated to form 5-methylcytosine"
ggggaggacacgaagacatacatcacctggctcctcagtggccttgctctgctgcttgagcgcctcacttgttatacagccaacacctgctagctgagtgggggttctctgtgataacagct

SEQ ID NO: 12778 - DNA, 122 bp, Homo sapiens
  misc_feature (61)..(62): /note="This region represents a CpG dinucleotide"
  misc_feature (61)..(61): /note="Nucleotide may be methylated to form 5-methylcytosine"
tgaattgaattctctttttcttgcaagctagcatagattggttcttccctcatagctagccgtatgactccttctcattgagatcacccagccatatctcctcaattctttatttcccacat

SEQ ID NO: 12779 - DNA, 122 bp, Homo sapiens
  misc_feature (61)..(62): /note="This region represents a CpG dinucleotide"
  misc_feature (61)..(61): /note="Nucleotide may be methylated to form 5-methylcytosine"
cataatccaaggtagctggggcttataaaaacacacattcggaggcatgttcttctgatgcgaagcctttaaaaaagagaggtgaaataacagaataggcaaggaaatcagtgcctttggtt

SEQ ID NO: 12780 - DNA, 122 bp, Homo sapiens
  misc_feature (61)..(62): /note="This region represents a CpG dinucleotide"
  misc_feature (61)..(61): /note="Nucleotide may be methylated to form 5-methylcytosine"
catatctcccactttgccctccctaatcccaccacacccagctcttaggatcagaaagtacgttgaagttccagggccactctcctgaataaaaagtgtggcttctgtttccggcagataag

SEQ ID NO: 12781 - DNA, 122 bp, Homo sapiens
  misc_feature (61)..(62): /note="This region represents a CpG dinucleotide"
  misc_feature (61)..(61): /note="Nucleotide may be methylated to form 5-methylcytosine"
gagtgagccgggcacacagttcccaggccccaaacaggcttgtctcattctgcatgacatcgctgtttctagaggtggaggcatagccaaacaggttgatccagtagttccctgcctcaggc

SEQ ID NO: 12782 - DNA, 122 bp, Homo sapiens
  misc_feature (61)..(62): /note="This region represents a CpG dinucleotide"
  misc_feature (61)..(61): /note="Nucleotide may be methylated to form 5-methylcytosine"
aacttgatccttagtaagtctgtgaagaaatggagaaacatgtctctttgtcaagaaaagcgagagttactggtttaaaaagtagtaaatactttttcatttgctgtcgtttggaaccagtt

SEQ ID NO: 12783 - DNA, 122 bp, Homo sapiens
  misc_feature (61)..(62): /note="This region represents a CpG dinucleotide"
  misc_feature (61)..(61): /note="Nucleotide may be methylated to form 5-methylcytosine"
tccatcggaaacctctcctcccaagcttgctttgaaatgggctgtgacatttggtcactgcgtagcaagtcctgtgagaatgagccgagtgcctgactttagaaagtgagtactttctaaag

SEQ ID NO: 12784 - DNA, 122 bp, Homo sapiens
  misc_feature (61)..(62): /note="This region represents a CpG dinucleotide"
  misc_feature (61)..(61): /note="Nucleotide may be methylated to form 5-methylcytosine"
tgcagctgtatccaagaaagccagcccagaggctgccagcactcccagggaccctattgacgttgacctggtgagatgggtttgaggtctgaaggggtggtggtggggcccagcaggtcagg

SEQ ID NO: 12785 - DNA, 122 bp, Homo sapiens
  misc_feature (61)..(62): /note="This region represents a CpG dinucleotide"
  misc_feature (61)..(61): /note="Nucleotide may be methylated to form 5-methylcytosine"
ttaccaaatggccaagattcaaaccacaaggacaattccaaagcccgtgagccttttatacgttgtttaatttccataaatcaccataaacaaaaatcttctttctcctttgctcctctctt

SEQ ID NO: 12786 - DNA, 122 bp, Homo sapiens
  misc_feature (61)..(62): /note="This region represents a CpG dinucleotide"
  misc_feature (61)..(61): /note="Nucleotide may be methylated to form 5-methylcytosine"
gggcagagttcgcagcaagtccagctcaatctgcttggaggctgggttctgtttctccagcgccttctgcagcaaggtctggaagtggccaggctcagtgttgtccttgaacttcctggtgt

SEQ ID NO: 12787 - DNA, 122 bp, Homo sapiens
  misc_feature (61)..(62): /note="This region represents a CpG dinucleotide"
  misc_feature (61)..(61): /note="Nucleotide may be methylated to form 5-methylcytosine"
gagggcagatcaccaagccaaagcagattatttctgagccttaaggtttctggtcttggccgggacctgtcactccttccttctttcctatttttccgtttgggaatgggaatgtctagcct

SEQ ID NO: 12788 - DNA, 122 bp, Homo sapiens
  misc_feature (61)..(62): /note="This region represents a CpG dinucleotide"
  misc_feature (61)..(61): /note="Nucleotide may be methylated to form 5-methylcytosine"
atcccaatgagtcaggagttattcatttattttctgctttgatgacaatatccattgatacggttataatccaagttggtgttttaaggcgcaatttttactcagctgtactccgtttcctt

SEQ ID NO: 12789 - DNA, 122 bp, Homo sapiens
  misc_feature (61)..(62): /note="This region represents a CpG dinucleotide"
  misc_feature (61)..(61): /note="Nucleotide may be methylated to form 5-methylcytosine"
taccttgctgactgggcagtgctccaggacacctgtgatgacttcacttccaaggtaatccgccaaatgttcttttgactggagatgccaccaagaaatctccagacattggaaggcatgca

SEQ ID NO: 12790 - DNA, 122 bp, Homo sapiens
  misc_feature (61)..(62): /note="This region represents a CpG dinucleotide"
  misc_feature (61)..(61): /note="Nucleotide may be methylated to form 5-methylcytosine"
aggaagtgcatgagttcaccagatgaaagaacttttgtagccaaggtgtgacattagacccgggacacaataaacagtgaatttaggtgcaggaagtgagactaggaggtggccagggacct

SEQ ID NO: 12791 - DNA, 122 bp, Homo sapiens
  misc_feature (61)..(62): /note="This region represents a CpG dinucleotide"
  misc_feature (61)..(61): /note="Nucleotide may be methylated to form 5-methylcytosine"
gatgagggccttgacctcaatggcagatcagttcaccctacattgtaaatggctcatatgcgtagagcaaacggtgatgggtggagggcagtggaaggggcgtggtgggaagtccagagaga

SEQ ID NO: 12792 - DNA, 122 bp, Homo sapiens
  misc_feature (61)..(62): /note="This region represents a CpG dinucleotide"
  misc_feature (61)..(61): /note="Nucleotide may be methylated to form 5-methylcytosine"
aggacagctggctgcctagggcctgattacagctggaacctcccaaaggatggaggaacacgtcatcagccagggccagcccaggccaccaagccagagctcaagggtgtggtgctttctcc

SEQ ID NO: 12793 - DNA, 122 bp, Homo sapiens
  misc_feature (61)..(62): /note="This region represents a CpG dinucleotide"
  misc_feature (61)..(61): /note="Nucleotide may be methylated to form 5-methylcytosine"
atggaagctttatttcactattgcatccttctaggggatttcatcattttcttttcttatcgtagttatttttagcatagttggaaataactgacaggccatgatgcaataatttctgctat

SEQ ID NO: 12794 - DNA, 122 bp, Homo sapiens
  misc_feature (61)..(62): /note="This region represents a CpG dinucleotide"
  misc_feature (61)..(61): /note="Nucleotide may be methylated to form 5-methylcytosine"
aaaggctggaaccttacctcttcctgtctggcatcacatgcactgtctcattctattgtgcggagacgtgagccaggtctgaattcaaatctatgaccctgccacttcctgtggggtgcata

SEQ ID NO: 12795 - DNA, 122 bp, Homo sapiens
  misc_feature (61)..(62): /note="This region represents a CpG dinucleotide"
  misc_feature (61)..(61): /note="Nucleotide may be methylated to form 5-methylcytosine"
agttcagacagacgagccagaaaacgggtgttctgtggcagcaggaaccacggtcgttcacgacgcccaaagaaatgagaggcccaggcagtgcctcacccagaggctgccccgccctcacc

SEQ ID NO: 12796 - DNA, 122 bp, Homo sapiens
  misc_feature (61)..(62): /note="This region represents a CpG dinucleotide"
  misc_feature (61)..(61): /note="Nucleotide may be methylated to form 5-methylcytosine"
aaatagtactgagtgtcagcaagggtgggagcaactgtcattctacactggggaggcaggcgtgtaatctgtacaaccagtttggaaaactgtggctgcgtaccttatgactcagcagtttc

SEQ ID NO: 12797 - DNA, 122 bp, Homo sapiens
  misc_feature (61)..(62): /note="This region represents a CpG dinucleotide"
  misc_feature (61)..(61): /note="Nucleotide may be methylated to form 5-methylcytosine"
tgcacacctactcagagggtctgagacctctgagtcaggcgtgtcgagtgaggtcagcaccgtgcctttgtgctattccagaagatccctgtccctaccccagcacaagtctccctgacttc

SEQ ID NO: 12798 - DNA, 122 bp, Homo sapiens
  misc_feature (61)..(62): /note="This region represents a CpG dinucleotide"
  misc_feature (61)..(61): /note="Nucleotide may be methylated to form 5-methylcytosine"
gcatttaatagagtcttcatttgtgaaatatgataatgccttatgattcagaggaatatacgaaggaaatatatagaaatttaaggtaatgcagtttgaggtaaagctttttttcaagaggt

SEQ ID NO: 12799 - DNA, 122 bp, Homo sapiens
  misc_feature (61)..(62): /note="This region represents a CpG dinucleotide"
  misc_feature (61)..(61): /note="Nucleotide may be methylated to form 5-methylcytosine"
ttactgcttcattctcttttcaaatgccaatgatgttgggtcatgtccttgactgaaatccgttgctgaccaaactccataacatagcctacaggaccctgaatgatctgacatccaaccca

SEQ ID NO: 12800 - DNA, 122 bp, Homo sapiens
  misc_feature (61)..(62): /note="This region represents a CpG dinucleotide"
  misc_feature (61)..(61): /note="Nucleotide may be methylated to form 5-methylcytosine"
gctctaggaattacatttttatgaattttagtaactcggtgtgacagccagcctccaagacggctcctagtgattcacacgcttatgtagtcccattccacagtggatggggtgacctgtgt

SEQ ID NO: 12801 - DNA, 122 bp, Homo sapiens
  misc_feature (61)..(62): /note="This region represents a CpG dinucleotide"
  misc_feature (61)..(61): /note="Nucleotide may be methylated to form 5-methylcytosine"
tattatatccattacatagtaacctgagaggttaatgtccatattacccaaggcaaaaaacgaatccagctcataagtagtggagcaaggatttaagcccaaatctgtctgactttgctatg

SEQ ID NO: 12802 - DNA, 122 bp, Homo sapiens
  misc_feature (61)..(62): /note="This region represents a CpG dinucleotide"
  misc_feature (61)..(61): /note="Nucleotide may be methylated to form 5-methylcytosine"
cgaactcctgacctcaaatgatctgcctgccttggcctcccaaagtgctgggattacaggcgtgagccaccacgcccggtgctgatggcatttggaaccaccctgtagttacatacacaagt

SEQ ID NO: 12803 - DNA, 122 bp, Homo sapiens
  misc_feature (61)..(62): /note="This region represents a CpG dinucleotide"
  misc_feature (61)..(61): /note="Nucleotide may be methylated to form 5-methylcytosine"
tctttctagcctttttttcctacatgccagtgtgtatgtaagtatccattcattttaaagcgaacaaatgaataagccagccagacagtgcagacaggaaagcagctgttaattgcccatgg

SEQ ID NO: 12804 - DNA, 122 bp, Homo sapiens
  misc_feature (61)..(62): /note="This region represents a CpG dinucleotide"
  misc_feature (61)..(61): /note="Nucleotide may be methylated to form 5-methylcytosine"
tgggcgttgccgtctgacctgtgcacagatgtggccaggtgaggacacaagctgttgtctcgtttgctgtgtgctgttcgcagacacgtctcactaggcggtttgctcagaactccagagga

SEQ ID NO: 12805 - DNA, 122 bp, Homo sapiens
  misc_feature (61)..(62): /note="This region represents a CpG dinucleotide"
  misc_feature (61)..(61): /note="Nucleotide may be methylated to form 5-methylcytosine"
tggcagactttagcttggtagaagccagccgaatgcaaaattggctgacttatgtggtgtcggtttctttgtcaggagattttcaagtgaaggctgagtaataccaggaaagggatgttaca

SEQ ID NO: 12806 - DNA, 122 bp, Homo sapiens
  misc_feature (61)..(62): /note="This region represents a CpG dinucleotide"
  misc_feature (61)..(61): /note="Nucleotide may be methylated to form 5-methylcytosine"
actggcatgcataaatcccaagctagtcagtagcagagctagtcggtagcagaactagtccgtagcagagctagtcggtagcagacctagccggtagcagtgctagtcggtggcagagctag

SEQ ID NO: 12807 - DNA, 122 bp, Homo sapiens
  misc_feature (61)..(62): /note="This region represents a CpG dinucleotide"
  misc_feature (61)..(61): /note="Nucleotide may be methylated to form 5-methylcytosine"
gctggggtgggcttggccatgaagtgactgaagggaggcaccagggcagctcagccagggcgtgggccatcatccagttcctggtagatattgtggaatggtttgttttgtttgagagagag

SEQ ID NO: 12808 - DNA, 122 bp, Homo sapiens
  misc_feature (61)..(62): /note="This region represents a CpG dinucleotide"
  misc_feature (61)..(61): /note="Nucleotide may be methylated to form 5-methylcytosine"
ttgcaccattttgagtagcatggtgaaatagcacggcatcctacatcatcctgctcaggacgtgaatcacccctttgtctagcacatccatgctgtagaggcttcctgcccattagtcactt

SEQ ID NO: 12809 - DNA, 122 bp, Homo sapiens
  misc_feature (61)..(62): /note="This region represents a CpG dinucleotide"
  misc_feature (61)..(61): /note="Nucleotide may be methylated to form 5-methylcytosine"
tctgttttcaaatacgtctgctagatacgaagtttctaccgactcagcacaatataattacgtaatgcatccattcacccatttcatactgagaaatatgcaatagttttctccagtgataa

SEQ ID NO: 12810 - DNA, 122 bp, Homo sapiens
  misc_feature (61)..(62): /note="This region represents a CpG dinucleotide"
  misc_feature (61)..(61): /note="Nucleotide may be methylated to form 5-methylcytosine"
tactgagctgtactcagatagcatttggggaaagtacgtgagtcacacataaaaacagaccgttcttaatgcaatgggaagggtgttaactataaaaggaccctgtccagctggctcaggga

SEQ ID NO: 12811 - DNA, 122 bp, Homo sapiens
  misc_feature (61)..(62): /note="This region represents a CpG dinucleotide"
  misc_feature (61)..(61): /note="Nucleotide may be methylated to form 5-methylcytosine"
atcctttgaagttggtaatgaggtcatccttctcccaagagtgaaagctacatttctacacgagttgtttcacagctagcctggtgtccagcagttgtccatgcagaccgggttcaccccta

SEQ ID NO: 12812 - DNA, 122 bp, Homo sapiens
  misc_feature (61)..(62): /note="This region represents a CpG dinucleotide"
  misc_feature (61)..(61): /note="Nucleotide may be methylated to form 5-methylcytosine"
gagattacaggtgtgagtcatcatgcccagccaacaggttactcttgagagtacaaacctcgcaacatcaccagcacaaaaatccccaactcaggcttggcatccagggaatgtgatctatg

SEQ ID NO: 12813 - DNA, 122 bp, Homo sapiens
  misc_feature (61)..(62): /note="This region represents a CpG dinucleotide"
  misc_feature (61)..(61): /note="Nucleotide may be methylated to form 5-methylcytosine"
ctggtgaggggtaacacaactggtgaacagcactgaaaactcacttgagatcaatgatcacgaactgcaggtgagtcagcgcaattgcgtgcttcacccaagtcttatccagctgcagcaac

SEQ ID NO: 12814 - DNA, 122 bp, Homo sapiens
  misc_feature (61)..(62): /note="This region represents a CpG dinucleotide"
  misc_feature (61)..(61): /note="Nucleotide may be methylated to form 5-methylcytosine"
acagttctacatactcaactctgagttgtctggcaagcataatggagggaggataccagccgtgaataattacagaataacctgtatcgtgtgatatgtttgaactgtcatacgtatgagtc

SEQ ID NO: 12815 - DNA, 122 bp, Homo sapiens
  misc_feature (61)..(62): /note="This region represents a CpG dinucleotide"
  misc_feature (61)..(61): /note="Nucleotide may be methylated to form 5-methylcytosine"
gtggctttgcagtgagccagcagggctcaaaatatctttattgctgtattagtttgttttcgcactgctgtaaagaagtacctgtggccaggcatggtgactcatggctgtaatcccagcac

SEQ ID NO: 12816 - DNA, 122 bp, Homo sapiens
  misc_feature (61)..(62): /note="This region represents a CpG dinucleotide"
  misc_feature (61)..(61): /note="Nucleotide may be methylated to form 5-methylcytosine"
ctcaaagggcaggtgctgctgaaagggcttcagccctttcctgtccaagatcaccacgaacgagtcgtattcaagtctcaacatggatctctgctgtaggaacacagaggaggatcgttaat

SEQ ID NO: 12817 - DNA, 122 bp, Homo sapiens
  misc_feature (61)..(62): /note="This region represents a CpG dinucleotide"
  misc_feature (61)..(61): /note="Nucleotide may be methylated to form 5-methylcytosine"
aggctgcagacccacttgtgttattgtaaatgaatcagaggggcaagaccttgttctttacggcgtgtgatttaaaatcagttttaaggtacctgccaggtgtatttagaggaaaaggcatg

SEQ ID NO: 12818 - DNA, 122 bp, Homo sapiens
  misc_feature (61)..(62): /note="This region represents a CpG dinucleotide"
  misc_feature (61)..(61): /note="Nucleotide may be methylated to form 5-methylcytosine"
tcatgtgtaaaattggtgagtaatgcatgtctgttgtcattagacaactgaggtcatctacggaaactccttgttcaggccatggctcttggcagtgctcactatgagtgcgatttgggtag

SEQ ID NO: 12819 - DNA, 122 bp, Homo sapiens
  misc_feature (61)..(62): /note="This region represents a CpG dinucleotide"
  misc_feature (61)..(61): /note="Nucleotide may be methylated to form 5-methylcytosine"
gaagagaggcctggaaagaacttcaggacttgatgacattgttgagcctctacatgcctacgttagcacttttcttacatgaacaatagagaagattattattcagctaatatcctttctga

SEQ ID NO: 12820 - DNA, 122 bp, Homo sapiens
  misc_feature (61)..(62): /note="This region represents a CpG dinucleotide"
  misc_feature (61)..(61): /note="Nucleotide may be methylated to form 5-methylcytosine"
acacttactgctgtcctttaagtcagggatcagctgtggactagtaataaactccctatccgttctgctaatccgcaagtcttcaagtgtcacagtgtctgataaactctggttgagacact

SEQ ID NO: 12821 - DNA, 122 bp, Homo sapiens
  misc_feature (61)..(62): /note="This region represents a CpG dinucleotide"
  misc_feature (61)..(61): /note="Nucleotide may be methylated to form 5-methylcytosine"
cttgaagagcgacattaactgaaatggctcatggctcatcctttgattcaggcctgcctgcgtggagagctggacagacttcctcctgactaatgagccctcgcatcctaattgggccaggg

SEQ ID NO: 12822 - DNA, 122 bp, Homo sapiens
  misc_feature (61)..(62): /note="This region represents a CpG dinucleotide"
  misc_feature (61)..(61): /note="Nucleotide may be methylated to form 5-methylcytosine"
gctccctggtcactgcagcagtcaggtagaatggcaggtcatgccctggcccttaaagtccgcttgggtgtgtgcacgttcttccgttcacatttcattggccaaagcaaatcacaaaccca

SEQ ID NO: 12823 - DNA, 122 bp, Homo sapiens
  misc_feature (61)..(62): /note="This region represents a CpG dinucleotide"
  misc_feature (61)..(61): /note="Nucleotide may be methylated to form 5-methylcytosine"
cctcatggacaccatccatatatcacagtagtacatgccagaatctaagagtaaggaatacgtttaagattgtgtgatgattctaatatgtggacacgttaggcactgatactctagtattt

SEQ ID NO: 12824 - DNA, 122 bp, Homo sapiens
  misc_feature (61)..(62): /note="This region represents a CpG dinucleotide"
  misc_feature (61)..(61): /note="Nucleotide may be methylated to form 5-methylcytosine"
atctaccattggctgcacatttgtcagcgtcctggtgctgtgctgggtgtttcacacgaacgatctctagcccttgcggcaactccttgaggaagggagtgttaactccattttaactcccc

SEQ ID NO: 12825 - DNA, 122 bp, Homo sapiens
  misc_feature (61)..(62): /note="This region represents a CpG dinucleotide"
  misc_feature (61)..(61): /note="Nucleotide may be methylated to form 5-methylcytosine"
tcaagagctgtgaggatactagtggcttgggtggagattacagtgagcatcttgcaacaccggaaagggcttgcctgagaaggaaatcaaattgagccaagaatattagcattacacagcaa

SEQ ID NO: 12826 - DNA, 122 bp, Homo sapiens
  misc_feature (61)..(62): /note="This region represents a CpG dinucleotide"
  misc_feature (61)..(61): /note="Nucleotide may be methylated to form 5-methylcytosine"
gggcccgtgctacagacggagcagggcgggcttggattcgaggtctgctaccgacaggctcgatgctgttactcagctgctctaagcctcagccctttgtctgggaaaagcccgcctcacag

SEQ ID NO: 12827 - DNA, 122 bp, Homo sapiens
  misc_feature (61)..(62): /note="This region represents a CpG dinucleotide"
  misc_feature (61)..(61): /note="Nucleotide may be methylated to form 5-methylcytosine"
cagcgcttggaatagcatgaggtgtggaaaggagctgacgtgctcacctcatcagtaaggcggcacagcatgctggcactagtatgggctttgcaaacagtcagacttgggtccaaatctct

SEQ ID NO: 12828 - DNA, 122 bp, Homo sapiens
  misc_feature (61)..(62): /note="This region represents a CpG dinucleotide"
  misc_feature (61)..(61): /note="Nucleotide may be methylated to form 5-methylcytosine"
aaactgagccagctacagggtggagatgaagagactcacccacatcacatcctaagtgagcgtgagagccagaattagaacccaggtctcctgacttgctctacagtcctgtctacttcctc

SEQ ID NO: 12829 - DNA, 122 bp, Homo sapiens
  misc_feature (61)..(62): /note="This region represents a CpG dinucleotide"
  misc_feature (61)..(61): /note="Nucleotide may be methylated to form 5-methylcytosine"
aagagaggaaggcttcccagatgcaggggaaaaagctctaagcctggctggagatgaatgcgttttgccaattcctggaaacaagaggcctgacatcatgagtaagacagaaactgtgtagg

SEQ ID NO: 12830 - DNA, 122 bp, Homo sapiens
  misc_feature (61)..(62): /note="This region represents a CpG dinucleotide"
  misc_feature (61)..(61): /note="Nucleotide may be methylated to form 5-methylcytosine"
cttgtcaggcagagatctgggcaggacagaagagaggaggtgcctggctcagttttgctgcgatcccaatgggtcacacgccttctggatccccccagaaggtctagaatggggtcacccct

SEQ ID NO: 12831 - DNA, 122 bp, Homo sapiens
  misc_feature (61)..(62): /note="This region represents a CpG dinucleotide"
  misc_feature (61)..(61): /note="Nucleotide may be methylated to form 5-methylcytosine"
aggcactcattgactactatgtcacacctataggccacagagcaccagcttgcatggccacgataccatcaccaggcacacccaggtagctactgagtaaaggctggctgccaaagatgaat

SEQ ID NO: 12832 - DNA, 122 bp, Homo sapiens
  misc_feature (61)..(62): /note="This region represents a CpG dinucleotide"
  misc_feature (61)..(61): /note="Nucleotide may be methylated to form 5-methylcytosine"
tcctggtctgagtctgagtgttttcatcaatcaagtgggtctaagactcctcctgcatagcgcagctgtagggattaagcaggataatattgagaaattccctgggactgcttgactgtagt

SEQ ID NO: 12833 - DNA, 122 bp, Homo sapiens
  misc_feature (61)..(62): /note="This region represents a CpG dinucleotide"
  misc_feature (61)..(61): /note="Nucleotide may be methylated to form 5-methylcytosine"
ttccagccataaaaaatatggcccaagatttacaaaaatatccctaaaacattccacatgcgtctcaaggcggagggtaattgttatgaacaaatccacacaaactcttgtgccaagagcaa

SEQ ID NO: 12834 - DNA, 122 bp, Homo sapiens
  misc_feature (61)..(62): /note="This region represents a CpG dinucleotide"
  misc_feature (61)..(61): /note="Nucleotide may be methylated to form 5-methylcytosine"
tggtttctcacaacctcaccaacacttgttattgtctgtctttttgatttaagccatcttcgtgggtgtgaagcggcatctcattgtggtcatgattttcagttccctaaagattcctgatg

SEQ ID NO: 12835 - DNA, 122 bp, Homo sapiens
  misc_feature (61)..(62): /note="This region represents a CpG dinucleotide"
  misc_feature (61)..(61): /note="Nucleotide may be methylated to form 5-methylcytosine"
atatgaggaattgtgagtcacagggtttttaagacaggtttcctggaacttgtcttttgtcgctagtaggagccagcaggtgtatccaggcagatatctacatgagccaggtgggcaggccc

SEQ ID NO: 12836 - DNA, 122 bp, Homo sapiens
  misc_feature (61)..(62): /note="This region represents a CpG dinucleotide"
  misc_feature (61)..(61): /note="Nucleotide may be methylated to form 5-methylcytosine"
gaatatcaggcttgaccagtgcttctcaaacttggacagatagatgaatcgccagggtatcgtgtttaaatgcagattctgattttataggtctggaaggggccaaagaatccacttgtctg

SEQ ID NO: 12837 - DNA, 122 bp, Homo sapiens
  misc_feature (61)..(62): /note="This region represents a CpG dinucleotide"
  misc_feature (61)..(61): /note="Nucleotide may be methylated to form 5-methylcytosine"
tcacagctttgaaatcccccaattaaaggcacaagcgcatggcaaagttggaagctttggcgcttccgggctcccagtacccacagcctggatggagatggtggcagtgacatggcctgggt

SEQ ID NO: 12838 - DNA, 122 bp, Homo sapiens
  misc_feature (61)..(62): /note="This region represents a CpG dinucleotide"
  misc_feature (61)..(61): /note="Nucleotide may be methylated to form 5-methylcytosine"
cgggctcacattaagcaatttacacatggtcatttggcaggaaggtggcatgggatcccacgtatgacacgcctcattctgtgatgaaacaccccctcagccacccccatctctgccccact

SEQ ID NO: 12839 - DNA, 122 bp, Homo sapiens
  misc_feature (61)..(62): /note="This region represents a CpG dinucleotide"
  misc_feature (61)..(61): /note="Nucleotide may be methylated to form 5-methylcytosine"
tcactatgcagttgacatcgaggccagcctctctggagtttaagaattagctaattcttccgttggaggagagggaagtctgcaatacccactaaaattgcagctgacttcctctttggctt

SEQ ID NO: 12840 - DNA, 122 bp, Homo sapiens
  misc_feature (61)..(62): /note="This region represents a CpG dinucleotide"
  misc_feature (61)..(61): /note="Nucleotide may be methylated to form 5-methylcytosine"
aacgtgtggtcaggtatagccatatctggccaggctggtatggacacctgttcctgtcttcgtgtcccatgggtgtagctgtgtgtaccaacccaagtgtgagtctgaatggagctggactt

SEQ ID NO: 12841 - DNA, 122 bp, Homo sapiens
  misc_feature (61)..(62): /note="This region represents a CpG dinucleotide"
  misc_feature (61)..(61): /note="Nucleotide may be methylated to form 5-methylcytosine"
cctgaaacctcccaggcagggaatcacctcttcacacacagtttgcatctctgcagttgacggcaggagcaaaaaatgtggccagccaggttggaagggtgacaactgatggaggcatggaa

SEQ ID NO: 12842 - DNA, 122 bp, Homo sapiens
  misc_feature (61)..(62): /note="This region represents a CpG dinucleotide"
  misc_feature (61)..(61): /note="Nucleotide may be methylated to form 5-methylcytosine"
ccagctttccccagttaggacttgatgcaaacagtatgtgttgaagaatgttttgtatgacgtgttcggtagtcatttttcatcatgttcacttgtaatgaatttcagcattttccacattg

SEQ ID NO: 12843 - DNA, 122 bp, Homo sapiens
  misc_feature (61)..(62): /note="This region represents a CpG dinucleotide"
  misc_feature (61)..(61): /note="Nucleotide may be methylated to form 5-methylcytosine"
tgactcagtagggctttggcaactatcagaattgtattacagtgcaatctttaccagcctcggcaacatggtgaaatcccattgtattaatctgttctcacactgctaataaagacataccc

SEQ ID NO: 12844 - DNA, 122 bp, Homo sapiens
  misc_feature (61)..(62): /note="This region represents a CpG dinucleotide"
  misc_feature (61)..(61): /note="Nucleotide may be methylated to form 5-methylcytosine"
cttaagagatagacaaatataaatagaaacctaattctaacatgatttctatagagaagacgagaaagagacagagtgaacagacctgaggtgctacatgcatgaatacttgctactggttt

SEQ ID NO: 12845 - DNA, 122 bp, Homo sapiens
  misc_feature (61)..(62): /note="This region represents a CpG dinucleotide"
  misc_feature (61)..(61): /note="Nucleotide may be methylated to form 5-methylcytosine"
agaagggaggataggtgttgtttaattctgagacaccttgcatgctagactgaagttatacggtacaagataagccatggagaactgtgacacattcctgagtacagtcattgttttgatga

SEQ ID NO: 12846 - DNA, 122 bp, Homo sapiens
  misc_feature (61)..(62): /note="This region represents a CpG dinucleotide"
  misc_feature (61)..(61): /note="Nucleotide may be methylated to form 5-methylcytosine"
cgtctgggtcaaccctccccacagccctgagggtcatccccattttactgatgatgttaccgagacttgaagaatcaaggcacctgcccaactactgagaacgcccaaccaccgagtggtgg

SEQ ID NO: 12847 - DNA, 122 bp, Homo sapiens
  misc_feature (61)..(62): /note="This region represents a CpG dinucleotide"
  misc_feature (61)..(61): /note="Nucleotide may be methylated to form 5-methylcytosine"
tcaggcacggaaatttcaacagtacttggcaatttcctagcagcttacaactgctgatcccgccaacacagggagtttagatgcagtttcctcgtccttctagtttctataaatgtccttcc

SEQ ID NO: 12848 - DNA, 122 bp, Homo sapiens
  misc_feature (61)..(62): /note="This region represents a CpG dinucleotide"
  misc_feature (61)..(61): /note="Nucleotide may be methylated to form 5-methylcytosine"
tgtagggtgctcctgagtcaccccgaatcacccccagccagttagacaggaagccattagcgagaggacaggacagtgactaaggggaaaactgacccccttctttctaggagtctggagct

SEQ ID NO: 12849 - DNA, 122 bp, Homo sapiens
  misc_feature (61)..(62): /note="This region represents a CpG dinucleotide"
  misc_feature (61)..(61): /note="Nucleotide may be methylated to form 5-methylcytosine"
attttgtgtctttacccacatggaaattcaacaaataatttagttcaattcagtaagtgccgatttattgagctcttaatatatgctagacacgtgggacatagagatgaaagagcctgttc

SEQ ID NO: 12850 - DNA, 122 bp, Homo sapiens
  misc_feature (61)..(62): /note="This region represents a CpG dinucleotide"
  misc_feature (61)..(61): /note="Nucleotide may be methylated to form 5-methylcytosine"
gccttcttgagtgtgcatgaccaagactctggaaagaatggtcaagttgtctgttacacacgtgataatttaccttttaaattagaaaagtcaataggtaattattatagattagtgacaag

SEQ ID NO: 12851 - DNA, 122 bp, Homo sapiens
  misc_feature (61)..(62): /note="This region represents a CpG dinucleotide"
  misc_feature (61)..(61): /note="Nucleotide may be methylated to form 5-methylcytosine"
caggtttcagaaatgtttgctgcatgcgctcattgtctgaatcattgtttcaggttgctccggttgctaagaagactatgaacaagtcagagaacctgctgtttgctggttcatcattagca

SEQ ID NO: 12852 - DNA, 122 bp, Homo sapiens
  misc_feature (61)..(62): /note="This region represents a CpG dinucleotide"
  misc_feature (61)..(61): /note="Nucleotide may be methylated to form 5-methylcytosine"
gggccttcttcaacactccacccctaggctgtgttcaaaactgcagcgtaactgagaaaacggtggcagcctggggtgaatgcagtccctcccttttcctaatccatgaaactcctctacat

SEQ ID NO: 12853 - DNA, 122 bp, Homo sapiens
  misc_feature (61)..(62): /note="This region represents a CpG dinucleotide"
  misc_feature (61)..(61): /note="Nucleotide may be methylated to form 5-methylcytosine"
tatataatatatattatatatatgtatatacatattttcctcattagtgggatggagtaacgctgagctgggcaaaagaaaggtccgaatttgcctggtaatattgccacaacttgaaagtg

SEQ ID NO: 12854 - DNA, 122 bp, Homo sapiens
  misc_feature (61)..(62): /note="This region represents a CpG dinucleotide"
  misc_feature (61)..(61): /note="Nucleotide may be methylated to form 5-methylcytosine"
catttatcttcttcctatttcaaaattcaaacctacatttctagagatttaaagatatgacgataaggaagttttaattggccaagatttgaagctaaagaggctaacctcaaggaattagt

SEQ ID NO: 12855 - DNA, 122 bp, Homo sapiens
  misc_feature (61)..(62): /note="This region represents a CpG dinucleotide"
  misc_feature (61)..(61): /note="Nucleotide may be methylated to form 5-methylcytosine"
ttacagcacttgagccacaacgcccagccaattcttgacactcactttaaacccctgatacgctgtggcactgtgcttgtccgagctggttcttcctgagtgcacactttcccctagccatg

SEQ ID NO: 12856 - DNA, 122 bp, Homo sapiens
  misc_feature (61)..(62): /note="This region represents a CpG dinucleotide"
  misc_feature (61)..(61): /note="Nucleotide may be methylated to form 5-methylcytosine"
ggagaaagggatgttctcaccgttcacagtggcggcactggattagtaggtcctcttctacgtaaggagcatgacagatagggcaggtcaccaggctggcacagggcccacagtgtgtgtaa

SEQ ID NO: 12857 - DNA, 122 bp, Homo sapiens
  misc_feature (61)..(62): /note="This region represents a CpG dinucleotide"
  misc_feature (61)..(61): /note="Nucleotide may be methylated to form 5-methylcytosine"
ctggctgattttcaactacacacaaagcatgaatcccggtgacacaacacaatgtaaatacgaacaaccttgacaaagctaaaggtacaaaaaataggaaggaagtgcaggagacctgatgg

SEQ ID NO: 12858 - DNA, 122 bp, Homo sapiens
  misc_feature (61)..(62): /note="This region represents a CpG dinucleotide"
  misc_feature (61)..(61): /note="Nucleotide may be methylated to form 5-methylcytosine"
tgagacaccgcgcccggccgtaatttccattttataggtgaggaaactcaggctccaagacgtgaagtcacttgtttgggtcattcagccagcaaccagcagagctggatctgcacccaggt

SEQ ID NO: 12859 - DNA, 122 bp, Homo sapiens
  misc_feature (61)..(62): /note="This region represents a CpG dinucleotide"
  misc_feature (61)..(61): /note="Nucleotide may be methylated to form 5-methylcytosine"
gagaatctacccgtgacagagctgcgtggaagctgacaggaggcccctctcaggaggtgacgcagaaactgggaccgggaaaatgaggcagggcccacgtgcggagacccagggaaggggga

SEQ ID NO: 12860 - DNA, 122 bp, Homo sapiens
  misc_feature (61)..(62): /note="This region represents a CpG dinucleotide"
  misc_feature (61)..(61): /note="Nucleotide may be methylated to form 5-methylcytosine"
aagaacaggcaccagtcccacccagccctgggaacccaggagaggcactacgcagcaatccggctctaggggaagggcagtcccacccagccctgggaacccaggataggtgcaaggcagca

SEQ ID NO: 12861 - DNA, 122 bp, Homo sapiens
  misc_feature (61)..(62): /note="This region represents a CpG dinucleotide"
  misc_feature (61)..(61): /note="Nucleotide may be methylated to form 5-methylcytosine"
ggttctctgcctcagtggctattcatacccatcctgaagaagaccaggtctcccagttgacgggagttactgactcacagtctagatgaggatttgtattgggcagagctgactcggtaatt

SEQ ID NO: 12862 - DNA, 122 bp, Homo sapiens
  misc_feature (61)..(62): /note="This region represents a CpG dinucleotide"
  misc_feature (61)..(61): /note="Nucleotide may be methylated to form 5-methylcytosine"
gggcaccactccagcatgctgcaatcctgccccctttagaggagacagtcttccttttgtcgccgttgcttcctggtgatcttcattgctttgtttgtgtttcctacctcacccctgaagga

SEQ ID NO: 12863 - DNA, 122 bp, Homo sapiens
  misc_feature (61)..(62): /note="This region represents a CpG dinucleotide"
  misc_feature (61)..(61): /note="Nucleotide may be methylated to form 5-methylcytosine"
caatgcattaggcacccaaaaagcctaacattcaaccgtaatatactggaggtcagaatacgtattatttagagttttaacttttgttaatctagatgcagggttgcctaaatcaaactctg

SEQ ID NO: 12864 - DNA, 122 bp, Homo sapiens
  misc_feature (61)..(62): /note="This region represents a CpG dinucleotide"
  misc_feature (61)..(61): /note="Nucleotide may be methylated to form 5-methylcytosine"
gtgtgagggaggtaacgtattacctggttgtctgtccagacacaacctgcagcagtgaatcgtaaagcattgaagaatgacggagagttaactcactcagtcacaaacttcaacttactagt

SEQ ID NO: 12865 - DNA, 122 bp, Homo sapiens
  misc_feature (61)..(62): /note="This region represents a CpG dinucleotide"
  misc_feature (61)..(61): /note="Nucleotide may be methylated to form 5-methylcytosine"
atttttttttcttatataactctgccctaaaacatgctacccccctcctttccttagtaccgtaataactttctctaaaagaggaagcaacacttttgggttatctgtttttaaaagactcc

SEQ ID NO: 12866 - DNA, 122 bp, Homo sapiens
  misc_feature (61)..(62): /note="This region represents a CpG dinucleotide"
  misc_feature (61)..(61): /note="Nucleotide may be methylated to form 5-methylcytosine"
gtaactggaaggccccgaagccagcttccagcaggcagggctgggaggttgaacttgagccggtttgggagccaggagcgagtgggtgacaggtcattcctgactgggaaggttgcttgaca

SEQ ID NO: 12867 - DNA, 122 bp, Homo sapiens
  misc_feature (61)..(62): /note="This region represents a CpG dinucleotide"
  misc_feature (61)..(61): /note="Nucleotide may be methylated to form 5-methylcytosine"
ggaactagcagcagtgacctctgaggagccctgggaacaccctggagctcctgagcaacacgttgcttgtgatcactgacctggatatcatgactgtgtgagcaacaccccccacacctcag

SEQ ID NO: 12868 - DNA, 122 bp, Homo sapiens
  misc_feature (61)..(62): /note="This region represents a CpG dinucleotide"
  misc_feature (61)..(61): /note="Nucleotide may be methylated to form 5-methylcytosine"
tcctgagcaggcagggctggcctgagtcatccccagcattaacggcagggcctggcaccccggcaagaaaaacataatggactctggcaccggatggtcctggttcaaatcccagttctact

SEQ ID NO: 12869 - DNA, 122 bp, Homo sapiens
  misc_feature (61)..(62): /note="This region represents a CpG dinucleotide"
  misc_feature (61)..(61): /note="Nucleotide may be methylated to form 5-methylcytosine"
cccacatgcaactagcagactctgcagaacaaaatattaatcctggagcagcagttctaccgtgcagcaagagccaccctaaggccacagcaagccagagtgagaatctgttgttccagctg

SEQ ID NO: 12870 - DNA, 122 bp, Homo sapiens
  misc_feature (61)..(62): /note="This region represents a CpG dinucleotide"
  misc_feature (61)..(61): /note="Nucleotide may be methylated to form 5-methylcytosine"
acacacactcaccctgtcctgccaccattaggtaaagtttcctgccactccttgcacatccgtcattaccaaagagatattaaactagacaactgtaaaaaaataacaccttcagtggcaaa

SEQ ID NO: 12871 - DNA, 122 bp, Homo sapiens
  misc_feature (61)..(62): /note="This region represents a CpG dinucleotide"
  misc_feature (61)..(61): /note="Nucleotide may be methylated to form 5-methylcytosine"
caaagacgtggctcttctaggagtccagggctttcacagatggcaacagctgttactttccgtaggtgaaaagttaatcaacaataaattcaggctgggcgtggtggctcaagcctgtaatc

SEQ ID NO: 12872 - DNA, 122 bp, Homo sapiens
  misc_feature (61)..(62): /note="This region represents a CpG dinucleotide"
  misc_feature (61)..(61): /note="Nucleotide may be methylated to form 5-methylcytosine"
agtcttctttccaaataaggaaaggaatgtgagctggtactgataagcctggtactgtggcgtgtccaggcatgtaacaaaggcagaaacgaaaaaaagagaaaaaggaaaaaaggttgtgg

SEQ ID NO: 12873 - DNA, 122 bp, Homo sapiens
  misc_feature (61)..(62): /note="This region represents a CpG dinucleotide"
  misc_feature (61)..(61): /note="Nucleotide may be methylated to form 5-methylcytosine"
aatataggtgaagcacttaatgtgctgccagttacatcagtacgcaagaaaagttagcaccgccattataataaccctgaatcataaagacctgaatgcccttagtcagagcaccacccaga

SEQ ID NO: 12874 - DNA, 122 bp, Homo sapiens
  misc_feature (61)..(62): /note="This region represents a CpG dinucleotide"
  misc_feature (61)..(61): /note="Nucleotide may be methylated to form 5-methylcytosine"
agatttaaaacatgaatggagtttaaacaagcagaatgaagaagaggaaggagaactgggcgaaagaggatttgagtcagagagaggaacacatgcagaggtcttggtttgtgaagaaatcc

SEQ ID NO: 12875 - DNA, 122 bp, Homo sapiens
  misc_feature (61)..(62): /note="This region represents a CpG dinucleotide"
  misc_feature (61)..(61): /note="Nucleotide may be methylated to form 5-methylcytosine"
catctccctaatttacaaagaggaaactgagccacattcccaaggtcacataactagcaacgagtgaagaagccaagattagtgtccagactgaatcattccagacacctgtgacatagtca

SEQ ID NO: 12876 - DNA, 122 bp, Homo sapiens
  misc_feature (61)..(62): /note="This region represents a CpG dinucleotide"
  misc_feature (61)..(61): /note="Nucleotide may be methylated to form 5-methylcytosine"
ccatcagcaaggcaccagagatggagtttctctacacactgactggcatctgatggtgtccgtttctgaactttgacaggtgtgcagtgacacctcactgtggttttaacttgcatttccct

SEQ ID NO: 12877 - DNA, 122 bp, Homo sapiens
  misc_feature (61)..(62): /note="This region represents a CpG dinucleotide"
  misc_feature (61)..(61): /note="Nucleotide may be methylated to form 5-methylcytosine"
agaagccagaagcagacactggacattgttcaggcacctggatcaagccacacctgaaggcggacatccctgaactttccatataactttcatgattcaggctccacccagtttgtctgggt

SEQ ID NO: 12878 - DNA, 122 bp, Homo sapiens
  misc_feature (61)..(62): /note="This region represents a CpG dinucleotide"
  misc_feature (61)..(61): /note="Nucleotide may be methylated to form 5-methylcytosine"
gattaactactatggaaactatctcccttactcccattgtgaacgagacacaatatatgacgtaaccttcagtcactggacaacaggcagcattaactatgatccctgagagaaggcaacaa

SEQ ID NO: 12879 - DNA, 122 bp, Homo sapiens
  misc_feature (61)..(62): /note="This region represents a CpG dinucleotide"
  misc_feature (61)..(61): /note="Nucleotide may be methylated to form 5-methylcytosine"
aaattcggataacgttaattgtgccactgtggtggcagtgcaagaaattcctgttcatcccgctgcaatgatgattaaggtaacaaacacccagtcgggaagtcaggctccggccctggaga

SEQ ID NO: 12880 - DNA, 122 bp, Homo sapiens
  misc_feature (61)..(62): /note="This region represents a CpG dinucleotide"
  misc_feature (61)..(61): /note="Nucleotide may be methylated to form 5-methylcytosine"
tgcgggataatctcagagtacttaaccttaatctcatttgcacagtcccctttgctatgtcgtaacatattcaaagattctggggattaggtcatggatatatttggaggggttattattct

SEQ ID NO: 12881 - DNA, 122 bp, Homo sapiens
  misc_feature (61)..(62): /note="This region represents a CpG dinucleotide"
  misc_feature (61)..(61): /note="Nucleotide may be methylated to form 5-methylcytosine"
aaacagaaactgggtggagactgtctcaaaatatgtaggacatttgtgacaagctggggacggaccaagaaggtggtgctgaggcagcactaatatgaattagcgttacaacaatgtcccag

SEQ ID NO: 12882 - DNA, 122 bp, Homo sapiens
  misc_feature (61)..(62): /note="This region represents a CpG dinucleotide"
  misc_feature (61)..(61): /note="Nucleotide may be methylated to form 5-methylcytosine"
ttctagattaatcattactcttattactcatattatgcttatggtagccaaaaactggaacgtacccaaatgcccaaccatggtagactggatatatgaattgttgtatgtctgcacaaaag

SEQ ID NO: 12883 - DNA, 122 bp, Homo sapiens
  misc_feature (61)..(62): /note="This region represents a CpG dinucleotide"
  misc_feature (61)..(61): /note="Nucleotide may be methylated to form 5-methylcytosine"
ggcacccacctctcttgctcttccttaatatattataagggagatggtgataagtggccacgtgagcctctgaggattcagtgtcccctgcaggtccaaccagttatgaccttggtgtggcc

SEQ ID NO: 12884 - DNA, 122 bp, Homo sapiens
  misc_feature (61)..(62): /note="This region represents a CpG dinucleotide"
  misc_feature (61)..(61): /note="Nucleotide may be methylated to form 5-methylcytosine"
tctgtgtcttctgcaccagcccatctggatgcagtgcaacctgtctggtctgctatcctgcgttcccctaactggcaccctcctgggccagccagcagcaggacatagaccaaggccaacct

SEQ ID NO: 12885 - DNA, 122 bp, Homo sapiens
  misc_feature (61)..(62): /note="This region represents a CpG dinucleotide"
  misc_feature (61)..(61): /note="Nucleotide may be methylated to form 5-methylcytosine"
agactatctcctttgtagcagagtgaacttgagtcacaacccgaagtcatcctggtgaagcggcttcatttgtctggggtaatacccgaggttagttgtctcatgccaaggaaatcgaggat

SEQ ID NO: 12886 - DNA, 122 bp, Homo sapiens
  misc_feature (61)..(62): /note="This region represents a CpG dinucleotide"
  misc_feature (61)..(61): /note="Nucleotide may be methylated to form 5-methylcytosine"
ccctacccaggcccaagggcagatgcacctgagccattgtgtcccatggttgatacgggacggggctgatttcctgacctggacccctgagacccagtgctcttagctgtgagcctctggga

SEQ ID NO: 12887 - DNA, 122 bp, Homo sapiens
  misc_feature (61)..(62): /note="This region represents a CpG dinucleotide"
  misc_feature (61)..(61): /note="Nucleotide may be methylated to form 5-methylcytosine"
tactggcaggtctggcagcatctggcagtttccgtgacatatttaggacactggactattcggcaaagctctgcaacccattgcctagggctttgttttcctagatgaactgagtacctcct

SEQ ID NO: 12888 - DNA, 122 bp, Homo sapiens
  misc_feature (61)..(62): /note="This region represents a CpG dinucleotide"
  misc_feature (61)..(61): /note="Nucleotide may be methylated to form 5-methylcytosine"
tataattgttctggtgagtgatgagcctgttgtgaccttctcccacttggctgctgaccacgtgagagggcagggctggtccagagtcctcacccgacctgagcgtccaactgcaactgtat

SEQ ID NO: 12889 - DNA, 122 bp, Homo sapiens
  misc_feature (61)..(62): /note="This region represents a CpG dinucleotide"
  misc_feature (61)..(61): /note="Nucleotide may be methylated to form 5-methylcytosine"
gccaggagtcaagtccaggcagtctgtctcatctcttaatcatgagtttgtgctacctctcgtctgtggatctaggcgtgaggaggtagaagggagcccctggtcacgcccctgtgccgcct

SEQ ID NO: 12890 - DNA, 122 bp, Homo sapiens
  misc_feature (61)..(62): /note="This region represents a CpG dinucleotide"
  misc_feature (61)..(61): /note="Nucleotide may be methylated to form 5-methylcytosine"
gacaggatctgacagctttgtattgctggcatccctgggggcatgagctgttcagtgacacgtcagcctccatctgcctctgtgcagcactagatttgggagggaggcttctcagatctcag

SEQ ID NO: 12891 - DNA, 122 bp, Homo sapiens
  misc_feature (61)..(62): /note="This region represents a CpG dinucleotide"
  misc_feature (61)..(61): /note="Nucleotide may be methylated to form 5-methylcytosine"
gaattcagtctttccagttccaaaacgccaaaagatcagtgaaggtaatatcttggcctgcgggttatagtttgcgtatagccataaaaccctaaagggcctatattatgccactttagaga

SEQ ID NO: 12892 - DNA, 122 bp, Homo sapiens
  misc_feature (61)..(62): /note="This region represents a CpG dinucleotide"
  misc_feature (61)..(61): /note="Nucleotide may be methylated to form 5-methylcytosine"
atgcactatcctagttagcagggaaccagaacaacagcttcagaacaggctgtgctgcaacgcaacctgttggttgagttggcaaacattgatcttgggaaatggctcccagacttccattc

SEQ ID NO: 12893 - DNA, 122 bp, Homo sapiens
  misc_feature (61)..(62): /note="This region represents a CpG dinucleotide"
  misc_feature (61)..(61): /note="Nucleotide may be methylated to form 5-methylcytosine"
aggtgacattcagctgctactgtgtgctgggccttttaactgagcgttcccaggtaaactcgtaacaaacctgcaaggcaggtattattatctacattgtattgatgggagaaaccaaagct

SEQ ID NO: 12894 - DNA, 122 bp, Homo sapiens
  misc_feature (61)..(62): /note="This region represents a CpG dinucleotide"
  misc_feature (61)..(61): /note="Nucleotide may be methylated to form 5-methylcytosine"
tgggttacagaaagaatataatgcaggcagtgaggtgaccagggcatgagtcaaatcctgcgcccaaccctggcttgggtatcagagtaggattcagctgcctccagtgaaaaagagactcc

SEQ ID NO: 12895 - DNA, 122 bp, Homo sapiens
  misc_feature (61)..(62): /note="This region represents a CpG dinucleotide"
  misc_feature (61)..(61): /note="Nucleotide may be methylated to form 5-methylcytosine"
attcacagcacagttaggactacaaaccagtcgtgcactttgtgtcttttcctcttttttcgtggaccttcccatgtgactcagctagtttttgaattaaaaaaaaaagcagtgctttacca

SEQ ID NO: 12896 - DNA, 122 bp, Homo sapiens
  misc_feature (61)..(62): /note="This region represents a CpG dinucleotide"
  misc_feature (61)..(61): /note="Nucleotide may be methylated to form 5-methylcytosine"
gtgaccttcagcaagttacccgcccgtccctgctccagtgctaaaatcagcacggcgatacgagaacctacttcaaggcatcatcatgaggaacgatgatgaagcagctaataatgactggg

SEQ ID NO: 12897 - DNA, 122 bp, Homo sapiens
  misc_feature (61)..(62): /note="This region represents a CpG dinucleotide"
  misc_feature (61)..(61): /note="Nucleotide may be methylated to form 5-methylcytosine"
ggacattttctggggtcggagaaggaaaggttatttgtcctattaggcctctggcccttgcgcctaccagaaatgagaggaaccatgcctgtttttaaatagcagggaaaactttttcagca

SEQ ID NO: 12898 - DNA, 122 bp, Homo sapiens
  misc_feature (61)..(62): /note="This region represents a CpG dinucleotide"
  misc_feature (61)..(61): /note="Nucleotide may be methylated to form 5-methylcytosine"
cgttttccttttatcaggtcctagagccaccagtcactgtttctggtctggacaaggctgcgtcacctacagagccacaggcctggttcactctccccaggcatctctgctgggttcctcct

SEQ ID NO: 12899 - DNA, 122 bp, Homo sapiens
  misc_feature (61)..(62): /note="This region represents a CpG dinucleotide"
  misc_feature (61)..(61): /note="Nucleotide may be methylated to form 5-methylcytosine"
catctcacacctaagggcatttttatttcccatttcaaattatagaggatttgattctaacgtgaggccaggactgagtcatcttcagtctaatgtcctgatcccagggcattataggtcac

SEQ ID NO: 12900 - DNA, 122 bp, Homo sapiens
  misc_feature (61)..(62): /note="This region represents a CpG dinucleotide"
  misc_feature (61)..(61): /note="Nucleotide may be methylated to form 5-methylcytosine"
ctgaatgtcctggatgtatccacaccctctaggaacaactgaacaaatctttcctggaaacggtgtttaattactcagagcagtgtcacattaatatagaagctgtgcatgtcttccgtata

SEQ ID NO: 12901 - DNA, 122 bp, Homo sapiens
  misc_feature (61)..(62): /note="This region represents a CpG dinucleotide"
  misc_feature (61)..(61): /note="Nucleotide may be methylated to form 5-methylcytosine"
ggcttccagctccagtaagcctttaatcctgtctaattcaagcacatcaaccctgggtatcggggaggagtggccagggtggtttgacccagaaggtacattgcatcttatcttgctgtgtt

SEQ ID NO: 12902 - DNA, 122 bp, Homo sapiens
  misc_feature (61)..(62): /note="This region represents a CpG dinucleotide"
  misc_feature (61)..(61): /note="Nucleotide may be methylated to form 5-methylcytosine"
tcacgtgccgccttccaggccacagtgaagacttttcatgttattctaggtgtgatggggcgccttggagtgtttcaacccggagagtgacatgatctgatttatgtttataaagtgcctgg

SEQ ID NO: 12903 - DNA, 122 bp, Homo sapiens
  misc_feature (61)..(62): /note="This region represents a CpG dinucleotide"
  misc_feature (61)..(61): /note="Nucleotide may be methylated to form 5-methylcytosine"
gtgtcttccttagtaatacttgttttaaaggtagtggttaggattttggaagtattttcacgtcagctatacctgtctcaactggtttgttcacacctggggcaattgtgttaaatttgttg

SEQ ID NO: 12904 - DNA, 122 bp, Homo sapiens
  misc_feature (61)..(62): /note="This region represents a CpG dinucleotide"
  misc_feature (61)..(61): /note="Nucleotide may be methylated to form 5-methylcytosine"
gaaggtagtaatagtcatacctgattcatacagttcttgtgaggattaattgggatactacgcatgaattacttagaatcatgcctagcgtctagcgacatgggtgagctggcagtcaccgc

SEQ ID NO: 12905 - DNA, 122 bp, Homo sapiens
  misc_feature (61)..(62): /note="This region represents a CpG dinucleotide"
  misc_feature (61)..(61): /note="Nucleotide may be methylated to form 5-methylcytosine"
gtcataaagcttggccagaaacgtagtcaggtagtgccctgagcacagcctagacactggcgctctaagaaacagccctttgcccaaggctatctggaagaaatagaacagggcacaacaca

SEQ ID NO: 12906 - DNA, 122 bp, Homo sapiens
  misc_feature (61)..(62): /note="This region represents a CpG dinucleotide"
  misc_feature (61)..(61): /note="Nucleotide may be methylated to form 5-methylcytosine"
gggattcactttcagatgagttgataagactgggaggatacattcatggggctgggaacacgtataatatgtgaatatgtgtgatgagtaatactaactaggcttgttagtgatggttctgt

SEQ ID NO: 12907 - DNA, 122 bp, Homo sapiens
  misc_feature (61)..(62): /note="This region represents a CpG dinucleotide"
  misc_feature (61)..(61): /note="Nucleotide may be methylated to form 5-methylcytosine"
acgggacacatggcttcctggtggcctcagccattgagctgagcagagtgaggatgccaccgcttctgtctccctgctctgctcctgggcctgagactctggggtgtgcggtcagtggggtg

SEQ ID NO: 12908 - DNA, 122 bp, Homo sapiens
  misc_feature (61)..(62): /note="This region represents a CpG dinucleotide"
  misc_feature (61)..(61): /note="Nucleotide may be methylated to form 5-methylcytosine"
agctgcctaaatgtatggtgatgcctgttcttgatgttgtttggtagatgactggctcgacgtatgcccttctcagtgctgtaggctgcatgttaaagctgcctttctttatcaggttctaa

SEQ ID NO: 12909 - DNA, 122 bp, Homo sapiens
  misc_feature (61)..(62): /note="This region represents a CpG dinucleotide"
  misc_feature (61)..(61): /note="Nucleotide may be methylated to form 5-methylcytosine"
actctgtcccttggcagcagaacaccaaccagcctcccggctccctttccgtggtcaccacggtttggggagtaaccaacacatcccagagccaggtaagagcctatactgccctcagccac

SEQ ID NO: 12910 - DNA, 122 bp, Homo sapiens
  misc_feature (61)..(62): /note="This region represents a CpG dinucleotide"
  misc_feature (61)..(61): /note="Nucleotide may be methylated to form 5-methylcytosine"
aacacagtgtcagatgcatagttggcatgcaataaatatttgctgaaagaatgactgaagcgggtccattgaatttagcaataagcagttactgttactgttgaccttggtgagacagtttc

SEQ ID NO: 12911 - DNA, 122 bp, Homo sapiens
  misc_feature (61)..(62): /note="This region represents a CpG dinucleotide"
  misc_feature (61)..(61): /note="Nucleotide may be methylated to form 5-methylcytosine"
tcacactccacatctactttgtctcagtgacttaaataattgaacaggcttggagcttaacggatcttctgttcttagccacaccttttcctctcatgagcctctggccataacaacatgct

SEQ ID NO: 12912 - DNA, 122 bp, Homo sapiens
  misc_feature (61)..(62): /note="This region represents a CpG dinucleotide"
  misc_feature (61)..(61): /note="Nucleotide may be methylated to form 5-methylcytosine"
ggcgtgagccaccacacctagcctccctaagaatttgtcagtcttattattcatctctgacgcttactggcttgagtcagccctttctgtcgcataccgtgcagcttgcccgaggctgccca

SEQ ID NO: 12913 - DNA, 122 bp, Homo sapiens
  misc_feature (61)..(62): /note="This region represents a CpG dinucleotide"
  misc_feature (61)..(61): /note="Nucleotide may be methylated to form 5-methylcytosine"
gagttcctccaggaggctgaggaggagcttggttgtgactgtgtaagggaggagggagtgcgtccatgacttttcaggctttgagagtgaaaccaaccaaaccagggatctggagtaggact

SEQ ID NO: 12914 - DNA, 122 bp, Homo sapiens
  misc_feature (61)..(62): /note="This region represents a CpG dinucleotide"
  misc_feature (61)..(61): /note="Nucleotide may be methylated to form 5-methylcytosine"
gaaggtggcaaatccccagctgggccagactgagaggggtggtgagacaccaaccagatgcggtgcaggccctcaaggatttgttaagcaatagaatagcccagttgatgtcaacagagggt

SEQ ID NO: 12915 - DNA, 122 bp, Homo sapiens
  misc_feature (61)..(62): /note="This region represents a CpG dinucleotide"
  misc_feature (61)..(61): /note="Nucleotide may be methylated to form 5-methylcytosine"
catagtcaacctggggttctaatccaaccatgatttgacaaaaatcaaactatgaactaacgtttgattactatcccattcagcaaagtcactcaaagcattaacaaatgagtgtagttcta

SEQ ID NO: 12916 - DNA, 122 bp, Homo sapiens
  misc_feature (61)..(62): /note="This region represents a CpG dinucleotide"
  misc_feature (61)..(61): /note="Nucleotide may be methylated to form 5-methylcytosine"
aggcaggaggcttccatcggctggcttcagttttactggtatactttgccaaatgaaatacggtcaccctacaagggccgttgttcagaacagacctctgccgttcagcttggcgcatatac

SEQ ID NO: 12917 - DNA, 122 bp, Homo sapiens
  misc_feature (61)..(62): /note="This region represents a CpG dinucleotide"
  misc_feature (61)..(61): /note="Nucleotide may be methylated to form 5-methylcytosine"
catacaagctgaggcgcttctttcgggatataagcccatgcagtctcaacaggtcaggagcgatagtaaaaacctgttgtctggctttgtatttggaataatggagtcactaatctacttga

SEQ ID NO: 12918 - DNA, 122 bp, Homo sapiens
  misc_feature (61)..(62): /note="This region represents a CpG dinucleotide"
  misc_feature (61)..(61): /note="Nucleotide may be methylated to form 5-methylcytosine"
taagtgacagagctgggttttaaacctaagcaatctagttccggaggctatgctctcaaccgcaaactctcattttcatgactaaatctatgataattatttcaccactcccttctttctgt

SEQ ID NO: 12919 - DNA, 122 bp, Homo sapiens
  misc_feature (61)..(62): /note="This region represents a CpG dinucleotide"
  misc_feature (61)..(61): /note="Nucleotide may be methylated to form 5-methylcytosine"
cgtgtgttaattgatacttcttaatcacttttaggtattaagtcatgatgcaggaatctgcgacagagacaataagcaacagttcaatgaatcaaaatggaatgagcactctaagcagccaa

SEQ ID NO: 12920 - DNA, 122 bp, Homo sapiens
  misc_feature (61)..(62): /note="This region represents a CpG dinucleotide"
  misc_feature (61)..(61): /note="Nucleotide may be methylated to form 5-methylcytosine"
gactggtgacacattttgagagtacagctgagataaaaggcttttcctatcatagtgtgacgttaaaggaggagaaaatggaaaggagagaaaagggacactttacctagaagtgtacaata

SEQ ID NO: 12921 - DNA, 122 bp, Homo sapiens
  misc_feature (61)..(62): /note="This region represents a CpG dinucleotide"
  misc_feature (61)..(61): /note="Nucleotide may be methylated to form 5-methylcytosine"
agactggattagttgttataaagtgaggtccctccctgtgtttgcctccttgcacatgcccgtctgcctttctgcttctgccatgtcttgatgcagcagatggccctcatcagaagccaaaa

SEQ ID NO: 12922 - DNA, 122 bp, Homo sapiens
  misc_feature (61)..(62): /note="This region represents a CpG dinucleotide"
  misc_feature (61)..(61): /note="Nucleotide may be methylated to form 5-methylcytosine"
atctggtcggaagcaaggaggtccgaggtcactgtcccttgaaggctgcagcggaggaaacggagaggctgggctggccctaccctacgtagcctaatcaaagcaagaatctgcaggattta

SEQ ID NO: 12923 - DNA, 122 bp, Homo sapiens
  misc_feature (61)..(62): /note="This region represents a CpG dinucleotide"
  misc_feature (61)..(61): /note="Nucleotide may be methylated to form 5-methylcytosine"
ctttgtaggggaggtatatgtcatacttacgcatcaagtaggacagcagaagcccagggacgtagcggcccaagacagccaaaaaggtcagtatcccacagctcagcaagcagaactgggga

SEQ ID NO: 12924 - DNA, 122 bp, Homo sapiens
  misc_feature (61)..(62): /note="This region represents a CpG dinucleotide"
  misc_feature (61)..(61): /note="Nucleotide may be methylated to form 5-methylcytosine"
attgtggaatggctgtgaagtagcacaaggctcaatgtcaagtgtcctctaatactccatcgcacgactaaaccctatgtcacttagcaacatttccctgccctgctctcccagctcttgtt

SEQ ID NO: 12925 - DNA, 122 bp, Homo sapiens
  misc_feature (61)..(62): /note="This region represents a CpG dinucleotide"
  misc_feature (61)..(61): /note="Nucleotide may be methylated to form 5-methylcytosine"
atattgcaacaggcttctggtgtccttgccaagctttaaaatgttaaatcccaggccaggcgtgatggctcactcctgtaatctcagcactttgggaggccaaggcagatggatcacttgag

SEQ ID NO: 12926 - DNA, 122 bp, Homo sapiens
  misc_feature (61)..(62): /note="This region represents a CpG dinucleotide"
  misc_feature (61)..(61): /note="Nucleotide may be methylated to form 5-methylcytosine"
gcaactctcaagtgacccagaaaagtcaaatcgagtttgaaaggaggttaccacatttcacggtaagaaatcttccgaggcctttgtgaaagggatagggattatacaattagaggtgagga

SEQ ID NO: 12927 - DNA, 122 bp, Homo sapiens
  misc_feature (61)..(62): /note="This region represents a CpG dinucleotide"
  misc_feature (61)..(61): /note="Nucleotide may be methylated to form 5-methylcytosine"
tcccctttagaacttccgggcttagtattttccttatgttgtctctgagagcctgacttccgttctccctgctaggctatccccaggcgtttccttccttgattcatgaactctaagatgac

SEQ ID NO: 12928 - DNA, 122 bp, Homo sapiens
  misc_feature (61)..(62): /note="This region represents a CpG dinucleotide"
  misc_feature (61)..(61): /note="Nucleotide may be methylated to form 5-methylcytosine"
ggctttctgtggtgcattttggcagccctgtgtggatgtgtcagaggctgtctgaccacgcgtgaggctcgttgatggtgataggtttctatgtgtgacgctaaaacgccaggaaagaaaag

SEQ ID NO: 12929 - DNA, 122 bp, Homo sapiens
  misc_feature (61)..(62): /note="This region represents a CpG dinucleotide"
  misc_feature (61)..(61): /note="Nucleotide may be methylated to form 5-methylcytosine"
cctggacagaaacaatcaggatggcctctcatcagaaacaggtccataggggtgagccagcggtcaacaagtcacaggataaacctggtacagcataacaggaagggttggatatattatgg

SEQ ID NO: 12930 - DNA, 122 bp, Homo sapiens
  misc_feature (61)..(62): /note="This region represents a CpG dinucleotide"
  misc_feature (61)..(61): /note="Nucleotide may be methylated to form 5-methylcytosine"
aacttgagatgttggcaagaatgaaagtcacccactaccggtttgctctggattgggcctcggtccttcccactggcaacctgtccgcggtgaaccgacaggccctgaggtactacaggtgc

SEQ ID NO: 12931 - DNA, 122 bp, Homo sapiens
  misc_feature (61)..(62): /note="This region represents a CpG dinucleotide"
  misc_feature (61)..(61): /note="Nucleotide may be methylated to form 5-methylcytosine"
tgtgtctgcccgtctctcatggcatattgtaattgtctctatggcaagccaagccaaggacgtgacacatcagagttcttaggccagcccaggagctgagctcataccttttgaaggtccct

SEQ ID NO: 12932 - DNA, 122 bp, Homo sapiens
  misc_feature (61)..(62): /note="This region represents a CpG dinucleotide"
  misc_feature (61)..(61): /note="Nucleotide may be methylated to form 5-methylcytosine"
cttccctttgtgtggcctgaagaccacattctgatcaacaggaagtaagcagtcgtgttgcgtaacaacccacagcaagctttaccagacagcttgtgtgtgccctttgtcccttctcttct

SEQ ID NO: 12933 - DNA, 122 bp, Homo sapiens
  misc_feature (61)..(62): /note="This region represents a CpG dinucleotide"
  misc_feature (61)..(61): /note="Nucleotide may be methylated to form 5-methylcytosine"
tgacaaaattgcctaatgatgcctttctcagaacggcattattcctgtcgttaagcaacacgtggctgtatcatataagttcttgactgtggcttgagtcttttgggcaatgtccagttggg

SEQ ID NO: 12934 - DNA, 122 bp, Homo sapiens
  misc_feature (61)..(62): /note="This region represents a CpG dinucleotide"
  misc_feature (61)..(61): /note="Nucleotide may be methylated to form 5-methylcytosine"
attccttcaccttctttagaacagacacaatgactgtcaatcctgagaaacttcaaggtgcgctacctagaatatcaaccagctcaaccagaagctgatcctgacacctgtgtcctacagga

SEQ ID NO: 12935 - DNA, 122 bp, Homo sapiens
  misc_feature (61)..(62): /note="This region represents a CpG dinucleotide"
  misc_feature (61)..(61): /note="Nucleotide may be methylated to form 5-methylcytosine"
agaaaaatgagaaggtcttaatctgaactccctcaactttctgttcttcctcacactcaccgaacttgcttatattttatactggtacttaattcttcccttcacagtcacaaggaagatgc

SEQ ID NO: 12936 - DNA, 122 bp, Homo sapiens
  misc_feature (61)..(62): /note="This region represents a CpG dinucleotide"
  misc_feature (61)..(61): /note="Nucleotide may be methylated to form 5-methylcytosine"
ctcgcgcgtgggccgcagctggcagcacaggaagtccaggtggaagagcggcggcgtgggcggcccggcgcggcgcggcgagtgcgggctggtatcggccgagctcgctttttctggggaca

SEQ ID NO: 12937 - DNA, 122 bp, Homo sapiens
  misc_feature (61)..(62): /note="This region represents a CpG dinucleotide"
  misc_feature (61)..(61): /note="Nucleotide may be methylated to form 5-methylcytosine"
cggcccatctggcttgcctttaggaaatgcttccacctgcagacaatagctttggggctacgcagagctgcatcattgtctctgtaaaatgctgcactgcgtggattctacactctcctcct

SEQ ID NO: 12938 - DNA, 122 bp, Homo sapiens
  misc_feature (61)..(62): /note="This region represents a CpG dinucleotide"
  misc_feature (61)..(61): /note="Nucleotide may be methylated to form 5-methylcytosine"
gacaatgtcatacctactgtttggggctgttatgcggattatttattgttttttgcatgacgtcaccacattggtcatgagatgttgtgaggattaaatgaatatggtaggtggagtagggc

SEQ ID NO: 12939 - DNA, 122 bp, Homo sapiens
  misc_feature (61)..(62): /note="This region represents a CpG dinucleotide"
  misc_feature (61)..(61): /note="Nucleotide may be methylated to form 5-methylcytosine"
atgcttttcttgttttaacttgaaattccctaatgacatgagtttgaacagtttttcatacgcttacttgccatctgtttatctttggtgtgaggtatctgttcaggtatttcacccatttt

SEQ ID NO: 12940 - DNA, 122 bp, Homo sapiens
  misc_feature (61)..(62): /note="This region represents a CpG dinucleotide"
  misc_feature (61)..(61): /note="Nucleotide may be methylated to form 5-methylcytosine"
ccgcatcatcactctaagggacaaaacaaaagaatcactagaaaaacagatccactagcacgagtcctccagggccacacccggtgccaccacgcatgtgatctaccagctgttcatcttga

SEQ ID NO: 12941 - DNA, 122 bp, Homo sapiens
  misc_feature (61)..(62): /note="This region represents a CpG dinucleotide"
  misc_feature (61)..(61): /note="Nucleotide may be methylated to form 5-methylcytosine"
atctccagataccactgtctactgattgagggactccaacttgatccagcaatcaagctacgtagacgaacagaaacagaattaaagcaattaagtgagtcaattcaactcaccacacttcg

SEQ ID NO: 12942 - DNA, 122 bp, Homo sapiens
  misc_feature (61)..(62): /note="This region represents a CpG dinucleotide"
  misc_feature (61)..(61): /note="Nucleotide may be methylated to form 5-methylcytosine"
tacactaaatttggaaaccaagtacaggaggaagacaggaaaacagtgaggagcagagtgcgggagaggctaccagctacaagaccagttggaaggctattgctgtagtccaggggagaggt

SEQ ID NO: 12943 - DNA, 122 bp, Homo sapiens
  misc_feature (61)..(62): /note="This region represents a CpG dinucleotide"
  misc_feature (61)..(61): /note="Nucleotide may be methylated to form 5-methylcytosine"
tcaactttagctttatgtgttagaagtgagtcactaagtacgcttcatggtcaatgggagcggagttcagttccaccctttaaagggaggagtatcaaaagaatttttggaccttttttttt

SEQ ID NO: 12944 - DNA, 122 bp, Homo sapiens
  misc_feature (61)..(62): /note="This region represents a CpG dinucleotide"
  misc_feature (61)..(61): /note="Nucleotide may be methylated to form 5-methylcytosine"
caagctgcccagacaggcctgtggggctggctgagggttgggctgcccttagccaggccccgctgctggccagaggagtggcagatgccaaaccactgaagccaaaaaagctcttaaggcgg

SEQ ID NO: 12945 - DNA, 122 bp, Homo sapiens
  misc_feature (61)..(62): /note="This region represents a CpG dinucleotide"
  misc_feature (61)..(61): /note="Nucleotide may be methylated to form 5-methylcytosine"
taaatttcacactgaaagaaaaagaaaataaacttctagaaaattagataagtttataaacgatatagtgaaaatgggtatttgcaaggttttagagttgcattacattgacccattaaact

SEQ ID NO: 12946 - DNA, 122 bp, Homo sapiens
  misc_feature (61)..(62): /note="This region represents a CpG dinucleotide"
  misc_feature (61)..(61): /note="Nucleotide may be methylated to form 5-methylcytosine"
agttccatttgtcaagtctgacatacatcttaccataacagtttcctaaaataaaagatccgtgtttccccattattcttctcttaaaacaaaacaaaacaaaaatccattagttaagacag

SEQ ID NO: 12947 - DNA, 122 bp, Homo sapiens
  misc_feature (61)..(62): /note="This region represents a CpG dinucleotide"
  misc_feature (61)..(61): /note="Nucleotide may be methylated to form 5-methylcytosine"
attactcattctctcactgactcacacagagcaacttcccgtcctgaaaagttcatttatcgtaagtaccctgtaaagatgtaccattttttatcttttataccatgttttactgtacgttt

SEQ ID NO: 12948 - DNA, 122 bp, Homo sapiens
  misc_feature (61)..(62): /note="This region represents a CpG dinucleotide"
  misc_feature (61)..(61): /note="Nucleotide may be methylated to form 5-methylcytosine"
ttcacaccacttcctacttattaatgtggctggttcccatgtaccagattctactgagcacgttcacaatagtatctcattcagttgctccatcaccaccgatgatgtcggtgttactagtt

SEQ ID NO: 12949 - DNA, 122 bp, Homo sapiens
  misc_feature (61)..(62): /note="This region represents a CpG dinucleotide"
  misc_feature (61)..(61): /note="Nucleotide may be methylated to form 5-methylcytosine"
tatttctgaactttgcagttgagtctttttgatgagctaggcgctgttctaagtactttacgtgtattaacttgctgatctttgcaacagtcttatgaggtaggcattattactatccctgt

SEQ ID NO: 12950 - DNA, 122 bp, Homo sapiens
  misc_feature (61)..(62): /note="This region represents a CpG dinucleotide"
  misc_feature (61)..(61): /note="Nucleotide may be methylated to form 5-methylcytosine"
atggaattaaactgaaagacccaaactttctgaccctttatagaaagctcacttcatttacgctaactagaatgattcattgtgcctgtgactcagtgtgtcagcaagtgcttagatgtgag

SEQ ID NO: 12951 - DNA, 122 bp, Homo sapiens
  misc_feature (61)..(62): /note="This region represents a CpG dinucleotide"
  misc_feature (61)..(61): /note="Nucleotide may be methylated to form 5-methylcytosine"
ttaattctactccagcttccctgaaaaataggacttgagcccaattccttgcaggcttcacggccagcagagcacagtggtgtatcaccctgctggaagctatagttgatgactttatggct

SEQ ID NO: 12952 - DNA, 122 bp, Homo sapiens
  misc_feature (61)..(62): /note="This region represents a CpG dinucleotide"
  misc_feature (61)..(61): /note="Nucleotide may be methylated to form 5-methylcytosine"
tgcgcctggccatgttaagcatttcttaatgtgctgaaataatcactgcctgcttcaaaacgtagctcaaaaaaaatccacatttttcttcagatcctcaaaaaaaagctttaaccctttct

SEQ ID NO: 12953 - DNA, 122 bp, Homo sapiens
  misc_feature (61)..(62): /note="This region represents a CpG dinucleotide"
  misc_feature (61)..(61): /note="Nucleotide may be methylated to form 5-methylcytosine"
agtcactacttcagttttctctggattatggaccagaggagttaacgcaggttctaaaaacgcctaacattaccaggagattaggctgggctctgcaagaatccagttcaatagctattaaa

SEQ ID NO: 12954 - DNA, 122 bp, Homo sapiens
  misc_feature (61)..(62): /note="This region represents a CpG dinucleotide"
  misc_feature (61)..(61): /note="Nucleotide may be methylated to form 5-methylcytosine"
cgcaacatggacaggcccacatggagggcaactgaggttattccaaatatcagcagccaccgcagctgaacaagcagccaactgcctgtgctaacatgctagccatttcagtgaaacatctt

SEQ ID NO: 12955 - DNA, 122 bp, Homo sapiens
  misc_feature (61)..(62): /note="This region represents a CpG dinucleotide"
  misc_feature (61)..(61): /note="Nucleotide may be methylated to form 5-methylcytosine"
tcctgaggcttagcttccttggtttttcacaacttctaaaattaacctctgagctcttgccgctgcctttggagggcagccctggctaactctctcagaggccataagctgagcagcaggtg

SEQ ID NO: 12956 - DNA, 122 bp, Homo sapiens
  misc_feature (61)..(62): /note="This region represents a CpG dinucleotide"
  misc_feature (61)..(61): /note="Nucleotide may be methylated to form 5-methylcytosine"
agaatgattcatcctgatccctcataccagtaaagagtttcaagtgaagataaagaagaacgagggtatctggcctgtgatacctgcagaattcacaatgtttagggattagtcaaagtaac

SEQ ID NO: 12957 - DNA, 122 bp, Homo sapiens
  misc_feature (61)..(62): /note="This region represents a CpG dinucleotide"
  misc_feature (61)..(61): /note="Nucleotide may be methylated to form 5-methylcytosine"
ggctggagccaccttcttatgtcaaaccccacaaaggccaagccaatggctccagcatcacgaacagggaaacaggttctgagattaaatgagctgagaccaacccagggagactcagtggg

SEQ ID NO: 12958 - DNA, 122 bp, Homo sapiens
  misc_feature (61)..(62): /note="This region represents a CpG dinucleotide"
  misc_feature (61)..(61): /note="Nucleotide may be methylated to form 5-methylcytosine"
acctatcaagaatgaaaacaagaacctggtgcacctggtttttcaatactctactgtcatcggtatatgacagtaggtttatgtcataggtttatgacagctactcagtgactagctgagat

SEQ ID NO: 12959 - DNA, 122 bp, Homo sapiens
  misc_feature (61)..(62): /note="This region represents a CpG dinucleotide"
  misc_feature (61)..(61): /note="Nucleotide may be methylated to form 5-methylcytosine"
tgttttaccaacttatcataaattagccacagaactgcccaaagtacaagccagaacttacgtaagtcaaaaactgagtcatgattcagtcataattaatgtttttccttccttcccctttt

SEQ ID NO: 12960 - DNA, 122 bp, Homo sapiens
  misc_feature (61)..(62): /note="This region represents a CpG dinucleotide"
  misc_feature (61)..(61): /note="Nucleotide may be methylated to form 5-methylcytosine"
agttgcaaagcaggtaggcctagtacacaatccagtttcaacagtcaaccagtcaacccacgtttcccataatgcagaagtgcataatggcctacctaatgtaaataagtctgagcaattag

SEQ ID NO: 12961 - DNA, 122 bp, Homo sapiens
  misc_feature (61)..(62): /note="This region represents a CpG dinucleotide"
  misc_feature (61)..(61): /note="Nucleotide may be methylated to form 5-methylcytosine"
tgactgtatttggagataaggtatttagaaggtaattaaggttaaatgaggttgtaaaggcggagtctaatccaacaggattagtggccttgtaagacgatgaagaaatctctctctctctt

SEQ ID NO: 12962 - DNA, 122 bp, Homo sapiens
  misc_feature (61)..(62): /note="This region represents a CpG dinucleotide"
  misc_feature (61)..(61): /note="Nucleotide may be methylated to form 5-methylcytosine"
tgagggagaggaagagttcaaggatgaccagattttccagtctggcaaccgaatccataacggtcacatctactgaatggggagtaacaaaaaaaagagtcaagtttgggatgtgggtaaga

SEQ ID NO: 12963 - DNA, 122 bp, Homo sapiens
  misc_feature (61)..(62): /note="This region represents a CpG dinucleotide"
  misc_feature (61)..(61): /note="Nucleotide may be methylated to form 5-methylcytosine"
cacaaggagataccatctcacttcagttagaatggctattgtcaaatctaacctgcctctcgctcatactctcctcctctgttttcataacttggcagtagtactctttgcccaaggaaagc

SEQ ID NO: 12964 - DNA, 122 bp, Homo sapiens
  misc_feature (61)..(62): /note="This region represents a CpG dinucleotide"
  misc_feature (61)..(61): /note="Nucleotide may be methylated to form 5-methylcytosine"
taagtagggctgcctcaggctcccatgaaggttctcaggatgtcacccgtgctccacttgcgcttggtgtggccttgttgctccagtccagcagcagcaattgtcctaggtgtggctgtgtg

SEQ ID NO: 12965 - DNA, 122 bp, Homo sapiens
  misc_feature (61)..(62): /note="This region represents a CpG dinucleotide"
  misc_feature (61)..(61): /note="Nucleotide may be methylated to form 5-methylcytosine"
gagatgattaggacagagacgtgcatagagagatgatgccatgaggacgcggggaggagacggcatcttcaggcctaggagagaggctcaggaggaaccaggcctgcccgcaccttggcctc

SEQ ID NO: 12966 - DNA, 122 bp, Homo sapiens
  misc_feature (61)..(62): /note="This region represents a CpG dinucleotide"
  misc_feature (61)..(61): /note="Nucleotide may be methylated to form 5-methylcytosine"
tagatcctttcatatccaaaccactatcaaactgagttcttccaagactaacattaggaacgttagagttaacccaagacactgcttcacagtgccatgcagacctagccgagtctgataac

SEQ ID NO: 12967 - DNA, 122 bp, Homo sapiens
  misc_feature (61)..(62): /note="This region represents a CpG dinucleotide"
  misc_feature (61)..(61): /note="Nucleotide may be methylated to form 5-methylcytosine"
ggcttccatttctttcccactttctgcagggctggtaaggccacagagtctgggcacaggcgtagcccaagtcagcttttgagaaatgatgacagaagcaaaaacctggtaatcctagattt

SEQ ID NO: 12968 - DNA, 122 bp, Homo sapiens
  misc_feature (61)..(62): /note="This region represents a CpG dinucleotide"
  misc_feature (61)..(61): /note="Nucleotide may be methylated to form 5-methylcytosine"
acaacaaactagtaactggttggccagggacagggtatgagtggagcttgggaagctgtgcgacaggtttgagaggacgatgttctaggctcatctcaaaagtatactgtatatagttttgt

SEQ ID NO: 12969 - DNA, 122 bp, Homo sapiens
  misc_feature (61)..(62): /note="This region represents a CpG dinucleotide"
  misc_feature (61)..(61): /note="Nucleotide may be methylated to form 5-methylcytosine"
ttatgcatgcaaagtcccacatcctagacacaaaccttcagctcaggaatgtggcttaggcggggcttgctagcaatggaaacagcagagagaaaaccaggaggcactagaagaaaaaaaca

SEQ ID NO: 12970 - DNA, 122 bp, Homo sapiens
  misc_feature (61)..(62): /note="This region represents a CpG dinucleotide"
  misc_feature (61)..(61): /note="Nucleotide may be methylated to form 5-methylcytosine"
ataacatcatggcattgttccttgggtagacagagccatgaccttggtatatctcatccccgcgaacaaaaatatccagaaatgtctttaagtgtctttaagctctcattttctattgaatt

SEQ ID NO: 12971 - DNA, 122 bp, Homo sapiens
  misc_feature (61)..(62): /note="This region represents a CpG dinucleotide"
  misc_feature (61)..(61): /note="Nucleotide may be methylated to form 5-methylcytosine"
gttgtagctgagatgaatcactttcacagtaaccggatctatgattacaacagtgtcatccgcctgtacctggagcagcaagtgcaattttacgaaacggtgagtgggcgtccacgtgcctt

SEQ ID NO: 12972 - DNA, 122 bp, Homo sapiens
  misc_feature (61)..(62): /note="This region represents a CpG dinucleotide"
  misc_feature (61)..(61): /note="Nucleotide may be methylated to form 5-methylcytosine"
agccgccacacagaaaacccaggaacaagcaagacactggagttaggcacatctaggctgcgccacccctaactgtgtgacctgagaaaggcacctaaaccaaactggtcttgtctcctaac

SEQ ID NO: 12973 - DNA, 122 bp, Homo sapiens
  misc_feature (61)..(62): /note="This region represents a CpG dinucleotide"
  misc_feature (61)..(61): /note="Nucleotide may be methylated to form 5-methylcytosine"
cttaaaaccctttaatcctcatcatgtacaggatgtaagatccaaactccttgtaaagggcgtatgaaatcctctgcgatctgctccttgtctactcttggatcttgtccttagtaactcca

SEQ ID NO: 12974 - DNA, 122 bp, Homo sapiens
  misc_feature (61)..(62): /note="This region represents a CpG dinucleotide"
  misc_feature (61)..(61): /note="Nucleotide may be methylated to form 5-methylcytosine"
atgccccagagagttgaaagcagggactctgaacagacatttgtgcatccatgttcattgcggcactattcacaatagccaaaagatggcagcaacccaagtacccatcaagggattaatgg

SEQ ID NO: 12975 - DNA, 122 bp, Homo sapiens
  misc_feature (61)..(62): /note="This region represents a CpG dinucleotide"
  misc_feature (61)..(61): /note="Nucleotide may be methylated to form 5-methylcytosine"
atctttgttcttaatattgccacatcttaagcatgagccagttggatattctgtactgcccgtaaaagccaggagttaatttactgctgcaaaatactcttctctcaccaaccatccttgct

SEQ ID NO: 12976 - DNA, 122 bp, Homo sapiens
  misc_feature (61)..(62): /note="This region represents a CpG dinucleotide"
  misc_feature (61)..(61): /note="Nucleotide may be methylated to form 5-methylcytosine"
aggctgaaggtagatgttgctaatcacagcactgttatccgcagccaggatctctagcatcgtttcatgtgttcagtggaacggggaaacagcttgtcaccctgttagcagagcatgctctc

SEQ ID NO: 12977 - DNA, 122 bp, Homo sapiens
  misc_feature (61)..(62): /note="This region represents a CpG dinucleotide"
  misc_feature (61)..(61): /note="Nucleotide may be methylated to form 5-methylcytosine"
cttctaaaccatagtgtattcacaggccacattccagcaagctcacaagtgccagcctgacgtgagtagtgctaatatcaaatctgacaacttccgttcggagtcaggcaggcagaatggta

SEQ ID NO: 12978 - DNA, 122 bp, Homo sapiens
  misc_feature (61)..(62): /note="This region represents a CpG dinucleotide"
  misc_feature (61)..(61): /note="Nucleotide may be methylated to form 5-methylcytosine"
aggggctggaatgacgcaatgggcctcttagaaatggcattactcaccatgcttgggaggcgtcctacaagcaggtagggttcccccacccaacaattttattttattttgtttgtttgttt

SEQ ID NO: 12979 - DNA, 122 bp, Homo sapiens
  misc_feature (61)..(62): /note="This region represents a CpG dinucleotide"
  misc_feature (61)..(61): /note="Nucleotide may be methylated to form 5-methylcytosine"
ctctatagctgtttgagtaacttctcttatccataaagctgtctgcataattcccccttgcgtatgtagttctgggtatgtctctaggcaggcacaatgtgcacttcttttgtttgtataaa

SEQ ID NO: 12980 - DNA, 122 bp, Homo sapiens
  misc_feature (61)..(62): /note="This region represents a CpG dinucleotide"
  misc_feature (61)..(61): /note="Nucleotide may be methylated to form 5-methylcytosine"
tgagccagtgctgctggccaagacgcgctcgtctgagtccatcccacacctgggcgcagacgccggcctgcatgctgcactgcacgccactgtggtccaggacctgggcctgcacgacggca

SEQ ID NO: 12981 - DNA, 122 bp, Homo sapiens
  misc_feature (61)..(62): /note="This region represents a CpG dinucleotide"
  misc_feature (61)..(61): /note="Nucleotide may be methylated to form 5-methylcytosine"
cttaactgaactgctgtgacttcattctgatcctctatcatttatgtgacttactgcattcgccacctaactggtctttgtgtttctgtctgtgtccgcctacaaccagttctcaaaaaact

SEQ ID NO: 12982 - DNA, 122 bp, Homo sapiens
  misc_feature (61)..(62): /note="This region represents a CpG dinucleotide"
  misc_feature (61)..(61): /note="Nucleotide may be methylated to form 5-methylcytosine"
ttagaagaagatgagtaagagtttgtttatttaaaaatatctttgaatgagttgattcagcggtattagtcaccatagaaatgacttaaattaaaaaccaagtttttgaaaacagcatgatc

SEQ ID NO: 12983 - DNA, 122 bp, Homo sapiens
  misc_feature (61)..(62): /note="This region represents a CpG dinucleotide"
  misc_feature (61)..(61): /note="Nucleotide may be methylated to form 5-methylcytosine"
actaactatctgcatggcagggcaaggtccttaacttcattaaacctccggttccttattcgtaaaatgaagacaataatggcacccattgggaggacttaaaaagctaatactgtgtatag

SEQ ID NO: 12984 - DNA, 122 bp, Homo sapiens
  misc_feature (61)..(62): /note="This region represents a CpG dinucleotide"
  misc_feature (61)..(61): /note="Nucleotide may be methylated to form 5-methylcytosine"
ctggcccctgtcaccaggtggctgcagcctagctatgacacaggcctctcttgcttatatcgataaggatctctggctactgtcccaatggtccagccctcctgggtcgaatgaagggcact

SEQ ID NO: 12985 - DNA, 122 bp, Homo sapiens
  misc_feature (61)..(62): /note="This region represents a CpG dinucleotide"
  misc_feature (61)..(61): /note="Nucleotide may be methylated to form 5-methylcytosine"
tgacattgagcagaatacagacaaattgtcaggcagttgggtgggatgaaaaagatgggacgacagccaacactatcaaaaggacctgagttcatgaatatctgggctagctcagtgaagct

SEQ ID NO: 12986 - DNA, 122 bp, Homo sapiens
  misc_feature (61)..(62): /note="This region represents a CpG dinucleotide"
  misc_feature (61)..(61): /note="Nucleotide may be methylated to form 5-methylcytosine"
acagaggcggagaaggggcgaagttactcgccctgtgtgatctggaacatccatcctctccggcctgcaggcatcagagctcctgggccgccggcctttggacccggatcaagacttacact

SEQ ID NO: 12987 - DNA, 122 bp, Homo sapiens
  misc_feature (61)..(62): /note="This region represents a CpG dinucleotide"
  misc_feature (61)..(61): /note="Nucleotide may be methylated to form 5-methylcytosine"
gggacagctgacccaagggccctactgcatgggtcgcacggttcagccagtccttgctggcgggacctgcatccccatcctactggctggcagagtaggactggtttcctgggacatctcca

SEQ ID NO: 12988 - DNA, 122 bp, Homo sapiens
  misc_feature (61)..(62): /note="This region represents a CpG dinucleotide"
  misc_feature (61)..(61): /note="Nucleotide may be methylated to form 5-methylcytosine"
ctcttaccacctatatccagccagataaataagctctcatcagccattttgaaatctgcacgtgtgtgacctaaaagcatcattgctacataaccaattgctcaatggtttgggtcattcaa

SEQ ID NO: 12989 - DNA, 122 bp, Homo sapiens
  misc_feature (61)..(62): /note="This region represents a CpG dinucleotide"
  misc_feature (61)..(61): /note="Nucleotide may be methylated to form 5-methylcytosine"
ttttaaattgtaagcccttctgaatgttgtgacgaaatcttgagtcaccctgctctgtctcgctggataggagtcatccctttgtccagcatatccatgctgcacacactgtctgcccatta

SEQ ID NO: 12990 - DNA, 122 bp, Homo sapiens
  misc_feature (61)..(62): /note="This region represents a CpG dinucleotide"
  misc_feature (61)..(61): /note="Nucleotide may be methylated to form 5-methylcytosine"
aatgcactgtatttccttgtactccagatccctattagtgaaatgcctattaaaacatttcgtaaggccagcatggcagtgtgcatcagtagtcccatctatttgggaggatggcttgaggc

SEQ ID NO: 12991 - DNA, 122 bp, Homo sapiens
  misc_feature (61)..(62): /note="This region represents a CpG dinucleotide"
  misc_feature (61)..(61): /note="Nucleotide may be methylated to form 5-methylcytosine"
ggggctgggctttgtgctaagccctttgcaggcatcatctaatttaatattcacagtaaccgttgagatggatattattattgttattactcttaggcttaaagacattaatagatgtgaca

SEQ ID NO: 12992 - DNA, 122 bp, Homo sapiens
  misc_feature (61)..(62): /note="This region represents a CpG dinucleotide"
  misc_feature (61)..(61): /note="Nucleotide may be methylated to form 5-methylcytosine"
gagaagctgatgttttggtgtattgtcagccatcgtcctgggactcggagactatggcctcgcctccccaccctcctcttggaattacaagccctggggtttgaagctgactttatagctgc

SEQ ID NO: 12993 - DNA, 122 bp, Homo sapiens
  misc_feature (61)..(62): /note="This region represents a CpG dinucleotide"
  misc_feature (61)..(61): /note="Nucleotide may be methylated to form 5-methylcytosine"
actacacagaaagagggaggagcctccgggtaggttggagtgagtaggatgtagggtagccggcaggggagaagaggggcaaccttctgttccgtaatattgataccacccatttgtgtgtc

SEQ ID NO: 12994 - DNA, 122 bp, Homo sapiens
  misc_feature (61)..(62): /note="This region represents a CpG dinucleotide"
  misc_feature (61)..(61): /note="Nucleotide may be methylated to form 5-methylcytosine"
aagacaacaattgagtattgggcttttaataccttgaagcagaagttaaaaagagaaaaacgagttttcctgtacttacttggctgactcactccaaggctagcagtaggcagggccctagt

SEQ ID NO: 12995 - DNA, 122 bp, Homo sapiens
  misc_feature (61)..(62): /note="This region represents a CpG dinucleotide"
  misc_feature (61)..(61): /note="Nucleotide may be methylated to form 5-methylcytosine"
ggagccagggatccttcctcacaggcaacagggttagaatgtgaatccaggcatgtctgacgttaagcccaagctctctttctgctgcacaatgactcaacccgcttgcatcatctggacgg

SEQ ID NO: 12996 - DNA, 122 bp, Homo sapiens
  misc_feature (61)..(62): /note="This region represents a CpG dinucleotide"
  misc_feature (61)..(61): /note="Nucleotide may be methylated to form 5-methylcytosine"
acttcagccatgtccaacaccatggtgaataaggatgatcttccagtctccaaatattaccgtggaaagttgtctaaacccaaaattcatggtgatggagtgcaaaagatttcagctcaaga

SEQ ID NO: 12997 - DNA, 122 bp, Homo sapiens
  misc_feature (61)..(62): /note="This region represents a CpG dinucleotide"
  misc_feature (61)..(61): /note="Nucleotide may be methylated to form 5-methylcytosine"
tggtaccagagcacaatgactgtgtctgtgattcactaatccaagaaatcaggattagggcgtggaaggaggaattcgtgtttctggaagtccgtccacaaaattgtagcctcttgtcttga

SEQ ID NO: 12998 - DNA, 122 bp, Homo sapiens
  misc_feature (61)..(62): /note="This region represents a CpG dinucleotide"
  misc_feature (61)..(61): /note="Nucleotide may be methylated to form 5-methylcytosine"
ctgtgtcctccctagaacgtgccgagctgcctgtccctgccagagtgcagatgagcaaggcgaccgctcagccccaaagtttgcagacaaagcttttcatactccttaagtgggtcacagtg

SEQ ID NO: 12999 - DNA, 122 bp, Homo sapiens
  misc_feature (61)..(62): /note="This region represents a CpG dinucleotide"
  misc_feature (61)..(61): /note="Nucleotide may be methylated to form 5-methylcytosine"
aaacaacacagatggactctgtcctagctctggaggtcaggagtctgccgtctgttttaccgggctaagtcaaggtgtcagcagggctggctcctgctggaagcactgagggcaggattctt

SEQ ID NO: 13000 - DNA, 122 bp, Homo sapiens
  misc_feature (61)..(62): /note="This region represents a CpG dinucleotide"
  misc_feature (61)..(61): /note="Nucleotide may be methylated to form 5-methylcytosine"
tcttgcatcctagcttctgagaggcgtgcttcttggtgcccggcctttctgccacctccccggctcccctggattgagccctgtttgtctgggagagcccagagtgtcctgtagacacaggt

SEQ ID NO: 13001 - DNA, 122 bp, Homo sapiens
  misc_feature (61)..(62): /note="This region represents a CpG dinucleotide"
  misc_feature (61)..(61): /note="Nucleotide may be methylated to form 5-methylcytosine"
atctccctggctgacagcacagacctcaggtgaggcgagcagcaagcctgggctcctgagcgttagtcagagatgagatcagagcagggtgtgggaggctgtctgtgggtgtcattgctgtg

SEQ ID NO: 13002 - DNA, 122 bp, Homo sapiens
  misc_feature (61)..(62): /note="This region represents a CpG dinucleotide"
  misc_feature (61)..(61): /note="Nucleotide may be methylated to form 5-methylcytosine"
ttgaaatcagactttggagccacaaagaaccattccaattctgggtcgtccgcttacacacggtgaacggagcacatttcttctctgagccttggttcctttcctgtaaatggagtataacc

SEQ ID NO: 13003 - DNA, 122 bp, Homo sapiens
  misc_feature (61)..(62): /note="This region represents a CpG dinucleotide"
  misc_feature (61)..(61): /note="Nucleotide may be methylated to form 5-methylcytosine"
ctctagactagcagagtcttggtatttttccttgggaatctcccctttcctagtcacacccgtccatacaggtagacaactgtcgacccatgaaaaggaaacacactcctctttgttctccc

SEQ ID NO: 13004 - DNA, 122 bp, Homo sapiens
  misc_feature (61)..(62): /note="This region represents a CpG dinucleotide"
  misc_feature (61)..(61): /note="Nucleotide may be methylated to form 5-methylcytosine"
ctgacttcatccctctggtttcctgttgagccctctggaatgcatgtttccctgcagtgacgcatagtcagggaaggcaggcgctggggccgtgccctgactgagtgtgaggtaagggctct

SEQ ID NO: 13005 - DNA, 122 bp, Homo sapiens
  misc_feature (61)..(62): /note="This region represents a CpG dinucleotide"
  misc_feature (61)..(61): /note="Nucleotide may be methylated to form 5-methylcytosine"
ggccaaggaggagagacaggctcacctgtttggtgagaagttccatgcagatggcccctccgcccagaacatacctgcatgagaaaggttagtcagctgtgcctgacaaaatctccaagtct

SEQ ID NO: 13006 - DNA, 122 bp, Homo sapiens
  misc_feature (61)..(62): /note="This region represents a CpG dinucleotide"
  misc_feature (61)..(61): /note="Nucleotide may be methylated to form 5-methylcytosine"
atcgactcattcaagaggacattaatatgtcacttaaagttgcctttgggctattatttacgaaacactaatgggagttaaggcttctggccagattcagccttcaggtggactggattggc

SEQ ID NO: 13007 - DNA, 122 bp, Homo sapiens
  misc_feature (61)..(62): /note="This region represents a CpG dinucleotide"
  misc_feature (61)..(61): /note="Nucleotide may be methylated to form 5-methylcytosine"
gctgggcctgctccgtcttcccctctcctaacttcaccatgctcaggtctgtctcctgtacgttagctgctgctgcaacctgtcaccctccaacttggggtgtaacaaactaatttcctaag

SEQ ID NO: 13008 - DNA, 122 bp, Homo sapiens
  misc_feature (61)..(62): /note="This region represents a CpG dinucleotide"
  misc_feature (61)..(61): /note="Nucleotide may be methylated to form 5-methylcytosine"
tggctgatctctaagccactcagctgagctctgtcggtgggactcagatgggtgtatcatcgcttcccaaaaaaatgggacttgcccaggggaggggaatctctagcagccgaatggataat

SEQ ID NO: 13009 - DNA, 122 bp, Homo sapiens
  misc_feature (61)..(62): /note="This region represents a CpG dinucleotide"
  misc_feature (61)..(61): /note="Nucleotide may be methylated to form 5-methylcytosine"
atgaaccttcctgcctttgcccacaaggctgagaactcttcaaagtgagactgtgtcttacgcattttcacttcctccatcatttgacacaggacctggcacgtaacagatgtttaataaat

SEQ ID NO: 13010 - DNA, 122 bp, Homo sapiens
  misc_feature (61)..(62): /note="This region represents a CpG dinucleotide"
  misc_feature (61)..(61): /note="Nucleotide may be methylated to form 5-methylcytosine"
ggatattaatgacataaaagataatgcacccagattaaaacacacaatactggtgtcacccgctacacaccctaaccaacagagctaacctacagaaagtatttaaggtaagcagtaaagaa

SEQ ID NO: 13011 - DNA, 122 bp, Homo sapiens
  misc_feature (61)..(62): /note="This region represents a CpG dinucleotide"
  misc_feature (61)..(61): /note="Nucleotide may be methylated to form 5-methylcytosine"
ttccctactcagcctgtcaacccttcccggacctacccagcaggagcctcctctcccaaacgggcctgaggcccaaaccctgcagctcagtctcggcctccagtgcacagacaagggcaagt

SEQ ID NO: 13012 - DNA, 122 bp, Homo sapiens
  misc_feature (61)..(62): /note="This region represents a CpG dinucleotide"
  misc_feature (61)..(61): /note="Nucleotide may be methylated to form 5-methylcytosine"
ttactaaataatggcagctcctgttacgtctggtgtcattcatcatgactaaggccctctcggggaagtgggcagaacatatgatgatccgggggcctctttgtatttggtgcctacttacc

SEQ ID NO: 13013 - DNA, 122 bp, Homo sapiens
  misc_feature (61)..(62): /note="This region represents a CpG dinucleotide"
  misc_feature (61)..(61): /note="Nucleotide may be methylated to form 5-methylcytosine"
ccggcccggcccgggagtgagcctgcagcgagggattagcgcggtaatagccgggattagcgcaggctgcgagcgcgttagtcactaaactgcgcgttcgcatcccgagccacctcccctgg

SEQ ID NO: 13014 - DNA, 122 bp, Homo sapiens
  misc_feature (61)..(62): /note="This region represents a CpG dinucleotide"
  misc_feature (61)..(61): /note="Nucleotide may be methylated to form 5-methylcytosine"
attgcaagaaatatttgcttaagcaatacatttattattcataggtcagagcttggaaagcggcaggtgcacaggagcccttgacaatggcaaagcatgatcacatgtttaccgccaagaca

SEQ ID NO: 13015 - DNA, 122 bp, Homo sapiens
  misc_feature (61)..(62): /note="This region represents a CpG dinucleotide"
  misc_feature (61)..(61): /note="Nucleotide may be methylated to form 5-methylcytosine"
tgggtatgtgacaccctggattccatgcaggtttggcagtaaccagggagaattagaacccgaagctagatttcgaaatagagctctggactgaagcattcttgcacaaccatcccacagat

SEQ ID NO: 13016 - DNA, 122 bp, Homo sapiens
  misc_feature (61)..(62): /note="This region represents a CpG dinucleotide"
  misc_feature (61)..(61): /note="Nucleotide may be methylated to form 5-methylcytosine"
ggtctgggatgctgtccacagtcaccattcatctgacacaggcatgctatagtgtcacagcgctcacctccagagaggcccaggccgtggaaagaaggaaaactctgcacattcacttcctt

SEQ ID NO: 13017 - DNA, 122 bp, Homo sapiens
  misc_feature (61)..(62): /note="This region represents a CpG dinucleotide"
  misc_feature (61)..(61): /note="Nucleotide may be methylated to form 5-methylcytosine"
atcacatcaccagcaatctccctcctaggtagaagccccaaagaattaacaacaaaaggacgcaaacagatacttgtacacccatggtcacagcagcctgactcacaacagaacaaacagcc

SEQ ID NO: 13018 - DNA, 122 bp, Homo sapiens
  misc_feature (61)..(62): /note="This region represents a CpG dinucleotide"
  misc_feature (61)..(61): /note="Nucleotide may be methylated to form 5-methylcytosine"
tgatgtgtaataacagttatgtctatttgggcacaacagacactgtgtaggagtcttccccgcttcatttcctaacccttatcttgacgagcacactcatggaagagtcatggaaggcggga

SEQ ID NO: 13019 - DNA, 122 bp, Homo sapiens
  misc_feature (61)..(62): /note="This region represents a CpG dinucleotide"
  misc_feature (61)..(61): /note="Nucleotide may be methylated to form 5-methylcytosine"
gcatcagtgtaaaagagtttgaaactccttattgacaaaacacggcccactgtgtatcctcgagattagtctagcccatgaattcaatgttaagttcatgaaactcatatcccttgcaaatt

SEQ ID NO: 13020 - DNA, 122 bp, Homo sapiens
  misc_feature (61)..(62): /note="This region represents a CpG dinucleotide"
  misc_feature (61)..(61): /note="Nucleotide may be methylated to form 5-methylcytosine"
caactcccattttaaattgcctgccatgctgagtagagtgaatcatccctctgtccagcacgtccatgctgcatattcttcccgctcattagtcacttggtagctgtcttggctgtcagatc

SEQ ID NO: 13021 - DNA, 122 bp, Homo sapiens
  misc_feature (61)..(62): /note="This region represents a CpG dinucleotide"
  misc_feature (61)..(61): /note="Nucleotide may be methylated to form 5-methylcytosine"
ctgcctagagtctctcactttaaaccaagccccaggctctgttgctcatgctgaggtgggcggactgcttgagcccaggagttcaagaccaacctgcgcaacagggcaaaaccccatctcta

SEQ ID NO: 13022 - DNA, 122 bp, Homo sapiens
  misc_feature (61)..(62): /note="This region represents a CpG dinucleotide"
  misc_feature (61)..(61): /note="Nucleotide may be methylated to form 5-methylcytosine"
tcctagtcccagcccagaggatttatctaaacatcaccccattgctgtgtcatatgtgtccgtgtgcaaaaacaggggaaagagatggtgtcaaactctcactcagcagctctgaggcaaca

SEQ ID NO: 13023 - DNA, 122 bp, Homo sapiens
  misc_feature (61)..(62): /note="This region represents a CpG dinucleotide"
  misc_feature (61)..(61): /note="Nucleotide may be methylated to form 5-methylcytosine"
gatactcttatccctcttaatgccctcttaatccctctttctcacttgacaggatgatggcgtaattgaaatttcacaagcagtggcttctgctggtaacttgacaaaacccgaccaaaggg

SEQ ID NO: 13024 - DNA, 122 bp, Homo sapiens
  misc_feature (61)..(62): /note="This region represents a CpG dinucleotide"
  misc_feature (61)..(61): /note="Nucleotide may be methylated to form 5-methylcytosine"
catagccaatttggatttcctgaagcttaagtgtcagggcgcctgtcagggcccgaggaacgtgtttacagagctgtatatttttgggtaaaatttgtgaaagcaagatatttcagctgcaa

SEQ ID NO: 13025 - DNA, 122 bp, Homo sapiens
  misc_feature (61)..(62): /note="This region represents a CpG dinucleotide"
  misc_feature (61)..(61): /note="Nucleotide may be methylated to form 5-methylcytosine"
aaagaaacacagtcatttgccatggtggtcccttaagattacaatggctacaccatcaaccgtagtatgtagtgggctgtaccatctaggtttgtggaaatgcactccatgatggttgcaga

SEQ ID NO: 13026 - DNA, 122 bp, Homo sapiens
  misc_feature (61)..(62): /note="This region represents a CpG dinucleotide"
  misc_feature (61)..(61): /note="Nucleotide may be methylated to form 5-methylcytosine"
cttcaatgcgcaactcttacctcactcaagttggttaacctctatgtgctttgatagccacggcaataaaatactggcaacaaaaacacttaactcatcaggtgatgctgaggattaaacga

SEQ ID NO: 13027 - DNA, 122 bp, Homo sapiens
  misc_feature (61)..(62): /note="This region represents a CpG dinucleotide"
  misc_feature (61)..(61): /note="Nucleotide may be methylated to form 5-methylcytosine"
attattttcagtgtactactggactccaaatacagacatcatgagatgtccacttgcccacgtgtggacacacaggcaggagcggcccagatcctcccttgtctgtggcctggtctttccat

SEQ ID NO: 13028 - DNA, 122 bp, Homo sapiens
  misc_feature (61)..(62): /note="This region represents a CpG dinucleotide"
  misc_feature (61)..(61): /note="Nucleotide may be methylated to form 5-methylcytosine"
ttttgtgaggttagggagggatttcatgaggccaagtgatggttaaagccaggtcacatgcgggcactgtgtgttcatatctgctgcctctgacaaatgcagtaggttcagtctgggatgct

SEQ ID NO: 13029 - DNA, 122 bp, Homo sapiens
  misc_feature (61)..(62): /note="This region represents a CpG dinucleotide"
  misc_feature (61)..(61): /note="Nucleotide may be methylated to form 5-methylcytosine"
ggctgggactctgaggccaggattcgggcgctaaaccactgtgtgacactaggaagccatcgcccctctcccagactcagctccccagcctgaaacccaaaggagctggctgcgacgaccac

SEQ ID NO: 13030 - DNA, 122 bp, Homo sapiens
  misc_feature (61)..(62): /note="This region represents a CpG dinucleotide"
  misc_feature (61)..(61): /note="Nucleotide may be methylated to form 5-methylcytosine"
tctccatttccggcaccagcacaaggctgttagtaactggtgctgtcagtggttcttcaccgcacggtcctgactcactcttgtgtcatgaacaatggtgaggcgtgttggagtcatttgct

SEQ ID NO: 13031 - DNA, 122 bp, Homo sapiens
  misc_feature (61)..(62): /note="This region represents a CpG dinucleotide"
  misc_feature (61)..(61): /note="Nucleotide may be methylated to form 5-methylcytosine"
tgcctgaggtgcaggattgtgtccaaggcaacatctgagtgactcttcacctcttctcttcgcaccagacttggcctccctcgtgttgctgcttgtcttgagcatagagcccttagtggaga

SEQ ID NO: 13032 - DNA, 122 bp, Homo sapiens
  misc_feature (61)..(62): /note="This region represents a CpG dinucleotide"
  misc_feature (61)..(61): /note="Nucleotide may be methylated to form 5-methylcytosine"
aaccagcatgatggcagtggcctctccagatgagccgctgctgctgtcactaagtttggccgtttgagatgtctttttaggttttcacatttctgatgactgtgactggacctgcaagccag

SEQ ID NO: 13033 - DNA, 122 bp, Homo sapiens
  misc_feature (61)..(62): /note="This region represents a CpG dinucleotide"
  misc_feature (61)..(61): /note="Nucleotide may be methylated to form 5-methylcytosine"
tgagctgtattaacataattacgtggaaaagatctcacaatggaagacattcaaagaccacgccaaagtagaatcaggaggacctggctatggctcactgaccggtccaacttcttcacctt

SEQ ID NO: 13034 - DNA, 122 bp, Homo sapiens
  misc_feature (61)..(62): /note="This region represents a CpG dinucleotide"
  misc_feature (61)..(61): /note="Nucleotide may be methylated to form 5-methylcytosine"
gacctgagcgtccaactgcaactgtatgttccggcagctttaataggactctgtgctgcccgtattattcatagcagttgttaatgtgcctctctccttgggatcctggggtgactgaaggg

SEQ ID NO: 13035 - DNA, 122 bp, Homo sapiens
  misc_feature (61)..(62): /note="This region represents a CpG dinucleotide"
  misc_feature (61)..(61): /note="Nucleotide may be methylated to form 5-methylcytosine"
gcttaataaaaccaagacagccagcacctcctgcaaactaaatccacgttctgttcgatgcgtagacgttattctgggtcggctccaggtgtccaagagttgttcagtgtgtgttcattagg

SEQ ID NO: 13036 - DNA, 122 bp, Homo sapiens
  misc_feature (61)..(62): /note="This region represents a CpG dinucleotide"
  misc_feature (61)..(61): /note="Nucleotide may be methylated to form 5-methylcytosine"
atctgcctcacgacagctcatcccaggagacagagctacccagcagggccgtgtgaaggacgtccaatgagcttgtgcagcaaagaggtgatccctggcctgaccccagctggcatggcaat

SEQ ID NO: 13037 - DNA, 122 bp, Homo sapiens
  misc_feature (61)..(62): /note="This region represents a CpG dinucleotide"
  misc_feature (61)..(61): /note="Nucleotide may be methylated to form 5-methylcytosine"
accacactgtcaggtgggaaggctgatgtggcagagggagaatcagacaggagaatgttacgtaaccaaggattcagggaggtgatcgtttcacctgcttgcacctatcctaggtgtgttca

SEQ ID NO: 13038 - DNA, 122 bp, Homo sapiens
  misc_feature (61)..(62): /note="This region represents a CpG dinucleotide"
  misc_feature (61)..(61): /note="Nucleotide may be methylated to form 5-methylcytosine"
agctctatctattgtgactgcttggcattgtcaacctccgaagttgcctaaatcacccctcggagaagggaagagagtaacaacgctagcaaaaccatttttgttacagacatggttatata

SEQ ID NO: 13039 - DNA, 122 bp, Homo sapiens
  misc_feature (61)..(62): /note="This region represents a CpG dinucleotide"
  misc_feature (61)..(61): /note="Nucleotide may be methylated to form 5-methylcytosine"
aatacataagcttgatctgccctgaccagaatgtaagtcccttgttttgtacatatgaaacgtaagcttaaccagctcacaagatccttcagggccagaaaccatgtacagcttccacatat

SEQ ID NO: 13040 - DNA, 122 bp, Homo sapiens
  misc_feature (61)..(62): /note="This region represents a CpG dinucleotide"
  misc_feature (61)..(61): /note="Nucleotide may be methylated to form 5-methylcytosine"
acacccacttgaatcactgcctcagcatttctagcttaagacgagctttcctgtggaaggcgggggctccagaggggaagtgccagtgcctgccaaccagttagtgtgctcagcgaggtccc

SEQ ID NO: 13041 - DNA, 122 bp, Homo sapiens
  misc_feature (61)..(62): /note="This region represents a CpG dinucleotide"
  misc_feature (61)..(61): /note="Nucleotide may be methylated to form 5-methylcytosine"
aaaacgtgatacttgcaagagtttaaaacaacttgtaacaactggcagtgaggcggggcgcgtggagagagcaggataccaaaaaagctgtgtgtggcaatgcggggtggaggctgacctag

SEQ ID NO: 13042 - DNA, 122 bp, Homo sapiens
  misc_feature (61)..(62): /note="This region represents a CpG dinucleotide"
  misc_feature (61)..(61): /note="Nucleotide may be methylated to form 5-methylcytosine"
agaacaggcggggcaggccctgcaggtgagcggggcacaggtgctcacacccagatgaaccgcacccgcacgtgggcacgcacacacacacacacacacacaggggaggccacaggctccca

SEQ ID NO: 13043 - DNA, 122 bp, Homo sapiens
  misc_feature (61)..(62): /note="This region represents a CpG dinucleotide"
  misc_feature (61)..(61): /note="Nucleotide may be methylated to form 5-methylcytosine"
aaggaaggaaggaaggaaagaaaaaaaaaataaataaaaatgaaagataaagcatagggacgtctctgagacaaagagctgagtggaagaatcaagttaggactcagcagcgcaggatggcg

SEQ ID NO: 13044 - DNA, 122 bp, Homo sapiens
  misc_feature (61)..(62): /note="This region represents a CpG dinucleotide"
  misc_feature (61)..(61): /note="Nucleotide may be methylated to form 5-methylcytosine"
gccttttcctgacagtggatgaactcggaagtggtccaccctagagggcacctggggtgacggaaccttctgctgggggacaatgaggcaggaggcatgggaaattctgctcggttttctct

SEQ ID NO: 13045 - DNA, 122 bp, Homo sapiens
  misc_feature (61)..(62): /note="This region represents a CpG dinucleotide"
  misc_feature (61)..(61): /note="Nucleotide may be methylated to form 5-methylcytosine"
tctgtactgatgtgtcacttattaaatacttttgtaccatgagtaaaacttcaggtgtttcgcaagaaccaccattctcaatgagttgtattctttctttaatgtagccactgccataaggt

SEQ ID NO: 13046 - DNA, 122 bp, Homo sapiens
  misc_feature (61)..(62): /note="This region represents a CpG dinucleotide"
  misc_feature (61)..(61): /note="Nucleotide may be methylated to form 5-methylcytosine"
gcttggagtacgtgtggtcaccaggactgagtcgcttggaacagcagagcctgctccttgcgtaccacagggattaatcctgcttgtgctgggaaatgcaactcactcatgtatttggagaa

SEQ ID NO: 13047 - DNA, 122 bp, Homo sapiens
  misc_feature (61)..(62): /note="This region represents a CpG dinucleotide"
  misc_feature (61)..(61): /note="Nucleotide may be methylated to form 5-methylcytosine"
tttcctagtgtctaccgtgtgccatgtctcccttaattctcccaccagccccatgagacacgatgacactcattttacagatgacgaaatggagagaaatgaggtcagttgtctaacgtggc

SEQ ID NO: 13048 - DNA, 122 bp, Homo sapiens
  misc_feature (61)..(62): /note="This region represents a CpG dinucleotide"
  misc_feature (61)..(61): /note="Nucleotide may be methylated to form 5-methylcytosine"
ttacaggcgtgagccactgcacctggccttgatgcttcttttaatgtagattaaatgaggcgggtaggattaagctgttcttagtaatccactcctcattgtaaaagaaagacctgagaaca

SEQ ID NO: 13049 - DNA, 122 bp, Homo sapiens
  misc_feature (61)..(62): /note="This region represents a CpG dinucleotide"
  misc_feature (61)..(61): /note="Nucleotide may be methylated to form 5-methylcytosine"
tgtcttgtgccgggtgcagaggacattgaggtggggctgcctcatgcttcacagtcctagcgttattttccatgccatctgtgttctgactaaacccactttaggtatggggaaactgatgc

SEQ ID NO: 13050 - DNA, 122 bp, Homo sapiens
  misc_feature (61)..(62): /note="This region represents a CpG dinucleotide"
  misc_feature (61)..(61): /note="Nucleotide may be methylated to form 5-methylcytosine"
agggcaggaggggggagttatttacattagcatttgccaagttttcactgtttatcttaccggaaagtcaacagtgtgactattaacctcctgcataattaaaatttgggccttgttatggt

SEQ ID NO: 13051 - DNA, 122 bp, Homo sapiens
  misc_feature (61)..(62): /note="This region represents a CpG dinucleotide"
  misc_feature (61)..(61): /note="Nucleotide may be methylated to form 5-methylcytosine"
ctgaaatactcacctttggagccctgaatttccatataagaactgcaatgaccttgaggccgccatgctacgaagtctgggccatgaggaaaagccatttgtaggtgttctggctgagagtc

SEQ ID NO: 13052 - DNA, 122 bp, Homo sapiens
  misc_feature (61)..(62): /note="This region represents a CpG dinucleotide"
  misc_feature (61)..(61): /note="Nucleotide may be methylated to form 5-methylcytosine"
tgttgttcccttacatattaaaactattcagctcatttctttggaatcactcccccatgccgccatcctcaatgtttaaattccttattactcatcaggttaatgtgagaatcctattgcaa

SEQ ID NO: 13053 - DNA, 122 bp, Homo sapiens
  misc_feature (61)..(62): /note="This region represents a CpG dinucleotide"
  misc_feature (61)..(61): /note="Nucleotide may be methylated to form 5-methylcytosine"
taaagctatctagaagctcctcagcctaatgttatctcattaacatgaaaaagacacttacgtagatttcaagggttttaggagctttgtgctaagaacctaggacaaagaccagttatttt

SEQ ID NO: 13054 - DNA, 122 bp, Homo sapiens
  misc_feature (61)..(62): /note="This region represents a CpG dinucleotide"
  misc_feature (61)..(61): /note="Nucleotide may be methylated to form 5-methylcytosine"
cataaaattaacagattttagtgattacatgtgagcctcagggcagataaagagagccagcgatagcacttaggattcttacttaagcaacttggtggaaatcacactgagaaaggaaacaa

SEQ ID NO: 13055 - DNA, 122 bp, Homo sapiens
  misc_feature (61)..(62): /note="This region represents a CpG dinucleotide"
  misc_feature (61)..(61): /note="Nucleotide may be methylated to form 5-methylcytosine"
caatctggaaagtgggactttgtatgtaaaaactagagtggagaccaaaataaaacttcacggttcatgggtattgtgacaatgtggaagtggccacatcataatgaatcactatctgccag

SEQ ID NO: 13056 - DNA, 122 bp, Homo sapiens
  misc_feature (61)..(62): /note="This region represents a CpG dinucleotide"
  misc_feature (61)..(61): /note="Nucleotide may be methylated to form 5-methylcytosine"
tgcaagagaggtgaaggatgagtgggaagtcaagggaagtgcagagtcgagtacagtgtgcgtcctcagatgaagagtttcttggcagagttcatgacgctcccagtttataaaagtatccc

SEQ ID NO: 13057 - DNA, 122 bp, Homo sapiens
  misc_feature (61)..(62): /note="This region represents a CpG dinucleotide"
  misc_feature (61)..(61): /note="Nucleotide may be methylated to form 5-methylcytosine"
ttaaaaagttaaaaggctttgtgtattaaaaccatgccttctgaatcacaaggccatccacgtgtacaaagggaatgctttaataagaatgggacaccagcctggaagcctggcttgcttgc

SEQ ID NO: 13058 - DNA, 122 bp, Homo sapiens
  misc_feature (61)..(62): /note="This region represents a CpG dinucleotide"
  misc_feature (61)..(61): /note="Nucleotide may be methylated to form 5-methylcytosine"
catctttttcctgcaagtcagcattcttcctttctctgattaataatcctgtaacatcttcgatccactcccatagattactatagttaggtctatcttttaaaatcagattatactgggga

SEQ ID NO: 13059 - DNA, 122 bp, Homo sapiens
  misc_feature (61)..(62): /note="This region represents a CpG dinucleotide"
  misc_feature (61)..(61): /note="Nucleotide may be methylated to form 5-methylcytosine"
aactcctcctgaagttcagctgcaggtcaacatcttgacgggcattgaggtaaacaccagcgttcattgttttttggctgccatcgtaaaccttagcattaggaaatatattgatttgtatc

SEQ ID NO: 13060 - DNA, 122 bp, Homo sapiens
  misc_feature (61)..(62): /note="This region represents a CpG dinucleotide"
  misc_feature (61)..(61): /note="Nucleotide may be methylated to form 5-methylcytosine"
gaatcatcttagaaagattacataatgcaatctatgtcaagggctgggctcattgatgaacggaagctctctcttccctaaacaaggtggaaaggtggtgctggtgccctggaaacaccctg

SEQ ID NO: 13061 - DNA, 122 bp, Homo sapiens
  misc_feature (61)..(62): /note="This region represents a CpG dinucleotide"
  misc_feature (61)..(61): /note="Nucleotide may be methylated to form 5-methylcytosine"
ttttgactcacaactggctctgccccacctctgtaccttgaacacagacataatggctaccggcatgacagctatcttgtgaccatgatgggacaagcaaaagcacactaaggatgatggaa

SEQ ID NO: 13062 - DNA, 122 bp, Homo sapiens
  misc_feature (61)..(62): /note="This region represents a CpG dinucleotide"
  misc_feature (61)..(61): /note="Nucleotide may be methylated to form 5-methylcytosine"
gaagttacacaaccagtgagaaaggaatcttccctgggcaatgagatgagggctgactcacgatctcagctcttaggaatggctctccagctgctgacagaggccacatgggttcagccatg

SEQ ID NO: 13063 - DNA, 122 bp, Homo sapiens
  misc_feature (61)..(62): /note="This region represents a CpG dinucleotide"
  misc_feature (61)..(61): /note="Nucleotide may be methylated to form 5-methylcytosine"
tccgcgagggacagtgctcagagggagatttcccagagcctggtggagaaggactccctccgcaggcaggtgttcgagctgacggaccaggtctgcgagctgcgcacacagcttcgccagct

SEQ ID NO: 13064 - DNA, 122 bp, Homo sapiens
  misc_feature (61)..(62): /note="This region represents a CpG dinucleotide"
  misc_feature (61)..(61): /note="Nucleotide may be methylated to form 5-methylcytosine"
aataatctgtggcaggtactgagctaggcttccgggttgtagagctgcctaagtcctggccgctgcccttaggagctcacatcctaagaggggaggatgaagattaatctcctactcactgc

SEQ ID NO: 13065 - DNA, 122 bp, Homo sapiens
  misc_feature (61)..(62): /note="This region represents a CpG dinucleotide"
  misc_feature (61)..(61): /note="Nucleotide may be methylated to form 5-methylcytosine"
gggaaagagaatgaatggtggccccagtactggctcggtaggtgccaagcctacgtggcacgtggcacctttgcacacacttcattgtcttattgctctccagagcaagtccttggccatgc

SEQ ID NO: 13066 - DNA, 122 bp, Homo sapiens
  misc_feature (61)..(62): /note="This region represents a CpG dinucleotide"
  misc_feature (61)..(61): /note="Nucleotide may be methylated to form 5-methylcytosine"
atcaacactttccttggcgtgtccacactgctggctctctggaccctgggcatcatttcccgtcaagccaggctacacctgggtgagcagaacatgggagccaaatttgctctgttccaggt

SEQ ID NO: 13067 - DNA, 122 bp, Homo sapiens
  misc_feature (61)..(62): /note="This region represents a CpG dinucleotide"
  misc_feature (61)..(61): /note="Nucleotide may be methylated to form 5-methylcytosine"
atccccaaggcagggagaggattaaacagaccacttgatcagttcagaaccatgatgttacggagatgcttgattggggaaagcattccctaaactaggtataatctcagatatcagggcta

SEQ ID NO: 13068 - DNA, 122 bp, Homo sapiens
  misc_feature (61)..(62): /note="This region represents a CpG dinucleotide"
  misc_feature (61)..(61): /note="Nucleotide may be methylated to form 5-methylcytosine"
gtcactcaaggctacaccataaagggtgaatcattcaaggttacaataagaagggtgaatcgttaaaggctatagcatgaagggtgcattattcatggttacaacagagagaaggatgcatc

SEQ ID NO: 13069 - DNA, 122 bp, Homo sapiens
  misc_feature (61)..(62): /note="This region represents a CpG dinucleotide"
  misc_feature (61)..(61): /note="Nucleotide may be methylated to form 5-methylcytosine"
ctgtgccaagacccctattgatgtcctctgtgcagctgtggagctgttgcatgaagctgacgccctcctcttctggctcagcaggtacccgggttggggtgacgagtgagggactattgtca

SEQ ID NO: 13070 - DNA, 122 bp, Homo sapiens
  misc_feature (61)..(62): /note="This region represents a CpG dinucleotide"
  misc_feature (61)..(61): /note="Nucleotide may be methylated to form 5-methylcytosine"
gaacctcacctcataatacactccatggccatggtgagtcagaacaccactgcagcttggcgctagtgagcttaatgatacaggtccatatcactacttttgtaaaataagaagtacatttc

SEQ ID NO: 13071 - DNA, 122 bp, Homo sapiens
  misc_feature (61)..(62): /note="This region represents a CpG dinucleotide"
  misc_feature (61)..(61): /note="Nucleotide may be methylated to form 5-methylcytosine"
atgactcaggggaaggcatttcagggtaattctgattaatctaactcagtggttctcaatcgtagctgctcaataaaatcacctgggggaactgttaaagcagtcagggttaagaaactata

SEQ ID NO: 13072 - DNA, 122 bp, Homo sapiens
  misc_feature (61)..(62): /note="This region represents a CpG dinucleotide"
  misc_feature (61)..(61): /note="Nucleotide may be methylated to form 5-methylcytosine"
ctaactggaacccctctgaaggaccactcatgtcttgtgtgtgagtaacagccatggaaacgtggttgaagaactgaactttaggacctggactacccagagcaacagctactgcattcaag

SEQ ID NO: 13073 - DNA, 122 bp, Homo sapiens
  misc_feature (61)..(62): /note="This region represents a CpG dinucleotide"
  misc_feature (61)..(61): /note="Nucleotide may be methylated to form 5-methylcytosine"
aaaaaagaaagtctctttttacaacttttttgaggtataacttacatatcagaaaatcaccggttttaaatatacatttcaatgacttttagtaaatttcccaagttgtgcaaccatcatca

SEQ ID NO: 13074 - DNA, 122 bp, Homo sapiens
  misc_feature (61)..(62): /note="This region represents a CpG dinucleotide"
  misc_feature (61)..(61): /note="Nucleotide may be methylated to form 5-methylcytosine"
ccagtgccgtcctaaatcagttccagctagtgaccatttgtgccagtggtgccacaggcacggggaagacctctgtaatcttcacctaatcagatgatacctaaaccagtctggcaacaagg

SEQ ID NO: 13075 - DNA, 122 bp, Homo sapiens
  misc_feature (61)..(62): /note="This region represents a CpG dinucleotide"
  misc_feature (61)..(61): /note="Nucleotide may be methylated to form 5-methylcytosine"
gggttaaactctatacaaaaccattgctaaaaacaccacagttgctcaattggctaactacgcgatttaagcaagaaagtagctgaatcatgctacttggttatcttacattagcagaaact

SEQ ID NO: 13076 - DNA, 122 bp, Homo sapiens
  misc_feature (61)..(62): /note="This region represents a CpG dinucleotide"
  misc_feature (61)..(61): /note="Nucleotide may be methylated to form 5-methylcytosine"
tcctgggctgtggattctagtgcagattctgtggacagacagcctgactcatacccagcccgtccacttacaagctgtgtgactttgcctcagttccttaacctctctgggcctcagtttct

SEQ ID NO: 13077 - DNA, 122 bp, Homo sapiens
  misc_feature (61)..(62): /note="This region represents a CpG dinucleotide"
  misc_feature (61)..(61): /note="Nucleotide may be methylated to form 5-methylcytosine"
ttaagctgttcacattattgtgttataaaaccagcacaccaaggctttttatgtttttatcgtgtgtggaaatgaagaaaatggctaggcaaacctacagtaggcagaacacaaatagctgg

SEQ ID NO: 13078 - DNA, 122 bp, Homo sapiens
  misc_feature (61)..(62): /note="This region represents a CpG dinucleotide"
  misc_feature (61)..(61): /note="Nucleotide may be methylated to form 5-methylcytosine"
cctggccaggatggagttcttgtcacaacaaggactcggggcatcttcaggaccagcaagcgtggagatggggtggggtctggcccagacttcagacatggcagaaggctctgaaaacgaag

SEQ ID NO: 13079 - DNA, 122 bp, Homo sapiens
  misc_feature (61)..(62): /note="This region represents a CpG dinucleotide"
  misc_feature (61)..(61): /note="Nucleotide may be methylated to form 5-methylcytosine"
catataatcacttccttattctgtgacatttttggtggctttgcttccctgactgaacaccgactgataaaatggcagaggaggaaaaacaatttccctctacctttctaagttcagcagct

SEQ ID NO: 13080 - DNA, 122 bp, Homo sapiens
  misc_feature (61)..(62): /note="This region represents a CpG dinucleotide"
  misc_feature (61)..(61): /note="Nucleotide may be methylated to form 5-methylcytosine"
cggctagagcttcagcacaggctgggtctgctgtgccgggtctgtatggggacagctgcacgcctcttccgcttgtgtgagaacaaaggccggaacctggattctgatccaaaccccctggc

SEQ ID NO: 13081 - DNA, 122 bp, Homo sapiens
  misc_feature (61)..(62): /note="This region represents a CpG dinucleotide"
  misc_feature (61)..(61): /note="Nucleotide may be methylated to form 5-methylcytosine"
gccccagcgctgccccacaaccaggctggatttaaagcctgtgcagtaggcgtctgtcttcgcggtggcagcattttcctgtcctccccaggactgggagagtgcagcgctcctctttccct

SEQ ID NO: 13082 - DNA, 122 bp, Homo sapiens
  misc_feature (61)..(62): /note="This region represents a CpG dinucleotide"
  misc_feature (61)..(61): /note="Nucleotide may be methylated to form 5-methylcytosine"
tgcccagttctttctcatgcaaatccacgtgagtcctggttcaaggcaagctcagcttatcgtgcaaatcatcctctgtgactcagaagggaacgtgtaatggggctaacgctaagttttaa

SEQ ID NO: 13083 - DNA, 122 bp, Homo sapiens
  misc_feature (61)..(62): /note="This region represents a CpG dinucleotide"
  misc_feature (61)..(61): /note="Nucleotide may be methylated to form 5-methylcytosine"
cagcggccttgtggtaggaaaagactatctgtggcaaggttctggttggtttattttttgcgcaagacaagcatgaagaaaagaaaatgaagtaataggtaagccaactccacactatatga

SEQ ID NO: 13084 - DNA, 122 bp, Homo sapiens
  misc_feature (61)..(62): /note="This region represents a CpG dinucleotide"
  misc_feature (61)..(61): /note="Nucleotide may be methylated to form 5-methylcytosine"
gcagagggattcccgaggtttgcggagcggatcggtaagggtgagccccgaacctgtcttcgctcagttccatagtcgacagcctccttacctactgcaagtgtccagaaaaacccgtttag

SEQ ID NO: 13085 - DNA, 122 bp, Homo sapiens
  misc_feature (61)..(62): /note="This region represents a CpG dinucleotide"
  misc_feature (61)..(61): /note="Nucleotide may be methylated to form 5-methylcytosine"
aatagagaagtcaaacgcaaagacattttctgtacttttttgatactggttttcaaagaacgcaagagttctgtgggccactatcatcccattagaaggcagcatgtgctgggcggggactg

SEQ ID NO: 13086 - DNA, 122 bp, Homo sapiens
  misc_feature (61)..(62): /note="This region represents a CpG dinucleotide"
  misc_feature (61)..(61): /note="Nucleotide may be methylated to form 5-methylcytosine"
tgaggagattcaaacacagatctgcccattgcctgagtctgtgattttttttcattacatcgtgctgctcccttatttccagaggtgttctgagctgattggggcatgggccaggtcaaggt

SEQ ID NO: 13087 - DNA, 122 bp, Homo sapiens
  misc_feature (61)..(62): /note="This region represents a CpG dinucleotide"
  misc_feature (61)..(61): /note="Nucleotide may be methylated to form 5-methylcytosine"
aaggattttggtgtgggtgtctgaccagacgttcaggtttaaagtctcatggtgaatatgcgtggtgtagtaagcagagctgaagaggccattgacaggatcaatcaaaggttttttaaaaa

SEQ ID NO: 13088 - DNA, 122 bp, Homo sapiens
  misc_feature (61)..(62): /note="This region represents a CpG dinucleotide"
  misc_feature (61)..(61): /note="Nucleotide may be methylated to form 5-methylcytosine"
aaagtaaggaacctgtcccagctgcagtgagcccgagggaggtgtgactctggaagaagacgcagagatgaaacactgctggctctgctgacaggaatggctttgagccagagtgtggtggc

SEQ ID NO: 13089 - DNA, 122 bp, Homo sapiens
  misc_feature (61)..(62): /note="This region represents a CpG dinucleotide"
  misc_feature (61)..(61): /note="Nucleotide may be methylated to form 5-methylcytosine"
ttgttacaggtgtgatcacaccatcatgatgtgattttgtaacaggatgattttgtaacacgatgacattttgtaacagacacagagccagggacaataccactgagctgctgaagcaaccc

SEQ ID NO: 13090 - DNA, 122 bp, Homo sapiens
  misc_feature (61)..(62): /note="This region represents a CpG dinucleotide"
  misc_feature (61)..(61): /note="Nucleotide may be methylated to form 5-methylcytosine"
tcaaagtgccctgggggacctgtgatagtaaatccatgtatgcacacttccacaccctgacgtgtactgcatgtatccaccactgggcagtgtgcctcacaagtgagactgatgctcacgtg

SEQ ID NO: 13091 - DNA, 122 bp, Homo sapiens
  misc_feature (61)..(62): /note="This region represents a CpG dinucleotide"
  misc_feature (61)..(61): /note="Nucleotide may be methylated to form 5-methylcytosine"
tgctccagccacgtcagactcccttgtcctccccacacagcaaccaatcctgagtgtccacggctccagaggtatggttgggaaccccctctgtgagttttcacagatgcatcatcctagca

SEQ ID NO: 13092 - DNA, 122 bp, Homo sapiens
  misc_feature (61)..(62): /note="This region represents a CpG dinucleotide"
  misc_feature (61)..(61): /note="Nucleotide may be methylated to form 5-methylcytosine"
tgagccaactgaattaccaagtaatgggggccccatggcatcccatgacaggtggagagccggctcttcaccctggatggacctgaaatgcctgctaaggccttgctccaccgagtagcaca

SEQ ID NO: 13093 - DNA, 122 bp, Homo sapiens
  misc_feature (61)..(62): /note="This region represents a CpG dinucleotide"
  misc_feature (61)..(61): /note="Nucleotide may be methylated to form 5-methylcytosine"
tgaggttgaggctgaagcgaaccgtgatcgtgccaccggactccagtctgggtgacagagcgagacgctgtctcaaaaaaagagaagaagtcaggcataaaggaatgctttctgtatgattc

SEQ ID NO: 13094 - DNA, 122 bp, Homo sapiens
  misc_feature (61)..(62): /note="This region represents a CpG dinucleotide"
  misc_feature (61)..(61): /note="Nucleotide may be methylated to form 5-methylcytosine"
gtgctgatgcataagattacttcatccattctgacaacctcatcatggtgtcatgtgctccgtaagcctgagattagtgggattgttaccccattacaccgggttttacatacacaagcatt

SEQ ID NO: 13095 - DNA, 122 bp, Homo sapiens
  misc_feature (61)..(62): /note="This region represents a CpG dinucleotide"
  misc_feature (61)..(61): /note="Nucleotide may be methylated to form 5-methylcytosine"
agaaaaaaataaaagaagaaaaagaaagaatatctttttccatttcttcatttgttcatgcgttcaacaaatacttatcctatagtccaggcactaagctaggagtggcctggtcactcagt

SEQ ID NO: 13096 - DNA, 122 bp, Homo sapiens
  misc_feature (61)..(62): /note="This region represents a CpG dinucleotide"
  misc_feature (61)..(61): /note="Nucleotide may be methylated to form 5-methylcytosine"
cagccctcaatcagtagggtttagacacctgtttttgcctgcccagcctcctcttggaaacgcctctgccacgattgatggaagacagaaagtcacttttccagcagagcagagtacacatg

SEQ ID NO: 13097 - DNA, 122 bp, Homo sapiens
  misc_feature (61)..(62): /note="This region represents a CpG dinucleotide"
  misc_feature (61)..(61): /note="Nucleotide may be methylated to form 5-methylcytosine"
acaagttttctatttaaccagaggtccttttcatgttactcacagaggagacactcaagacggggtatcaatggaattgcagtttgataactaaacagaagcacacttgaaactctggtgac

SEQ ID NO: 13098 - DNA, 122 bp, Homo sapiens
  misc_feature (61)..(62): /note="This region represents a CpG dinucleotide"
  misc_feature (61)..(61): /note="Nucleotide may be methylated to form 5-methylcytosine"
aagtagccgggcgtggtggcgcatgcctgcatttccagctactccctgaggtgggaggatcgcttgaacccaggtggcagaggttgcggtgaactgagattgcgccattgcactccagcctg

SEQ ID NO: 13099 - DNA, 122 bp, Homo sapiens
  misc_feature (61)..(62): /note="This region represents a CpG dinucleotide"
  misc_feature (61)..(61): /note="Nucleotide may be methylated to form 5-methylcytosine"
gtagcatggcagaaagaagcaggtagagaatcaaggttagagagctgagtcatgagcatgcgagactcagagctgtccttgggtccccagatttgtgccaactagtgttggttttgcaaagt

SEQ ID NO: 13100 - DNA, 122 bp, Homo sapiens
  misc_feature (61)..(62): /note="This region represents a CpG dinucleotide"
  misc_feature (61)..(61): /note="Nucleotide may be methylated to form 5-methylcytosine"
gctaggattcattcacttagtagcattccctgcaagggcgttctgtatgcatcacacacacggcactgctgtcccacaatagtctgcactaaccacatggcagggcacatggctgtgaccag

SEQ ID NO: 13101 - DNA, 122 bp, Homo sapiens
  misc_feature (61)..(62): /note="This region represents a CpG dinucleotide"
  misc_feature (61)..(61): /note="Nucleotide may be methylated to form 5-methylcytosine"
ctgctcccaaatagggacagtgtcacaaggtggctcgaggcagaccagacacacactggccgtgggagcttgtgggcggggtttcttcctgttgtgaatacgtgcagaagtgtcactccggc

SEQ ID NO: 13102 - DNA, 122 bp, Homo sapiens
  misc_feature (61)..(62): /note="This region represents a CpG dinucleotide"
  misc_feature (61)..(61): /note="Nucleotide may be methylated to form 5-methylcytosine"
tgcaattatttctatgcctggtttcctccagcatgcttttctgtcatctgactcactcagcgctagactaacagtgggattaacatgcagtgggtacagttgtttcctggttactttgtctt

SEQ ID NO: 13103 - DNA, 122 bp, Homo sapiens
  misc_feature (61)..(62): /note="This region represents a CpG dinucleotide"
  misc_feature (61)..(61): /note="Nucleotide may be methylated to form 5-methylcytosine"
agggccatagtttgctgacccctgatatacaagcatgtagaagctgcatcactctgattacggctcctgggaatttggaagtgggaccctgaggctgtgttaggtaataactgtgggttgct

SEQ ID NO: 13104 - DNA, 122 bp, Homo sapiens
  misc_feature (61)..(62): /note="This region represents a CpG dinucleotide"
  misc_feature (61)..(61): /note="Nucleotide may be methylated to form 5-methylcytosine"
caggcctagacaggagagcacagatgccttcacaccgatcctgtcttcccgagagagatacgctcttggtttggtgagtgtgtggcaatggttttctccccaggagatggcaccccagataa

SEQ ID NO: 13105 - DNA, 122 bp, Homo sapiens
  misc_feature (61)..(62): /note="This region represents a CpG dinucleotide"
  misc_feature (61)..(61): /note="Nucleotide may be methylated to form 5-methylcytosine"
gtccaataccatggttgatctcatgggcaaccttgtccatgccgtggttgagcccctggacgcctttgtccaactccttgccggtgtggctccccatgttgctaagtccgttgaaaaccttc

SEQ ID NO: 13106 - DNA, 122 bp, Homo sapiens
  misc_feature (61)..(62): /note="This region represents a CpG dinucleotide"
  misc_feature (61)..(61): /note="Nucleotide may be methylated to form 5-methylcytosine"
ggggttggcacggggacttggagttggtgacctcactgctgccttgtgggtggggggcagcgttgggggaaaagtgagaatgaatggactagccattcctgcttgagtgcctctgtatgctg

SEQ ID NO: 13107 - DNA, 122 bp, Homo sapiens
  misc_feature (61)..(62): /note="This region represents a CpG dinucleotide"
  misc_feature (61)..(61): /note="Nucleotide may be methylated to form 5-methylcytosine"
tctgacctgcagggaggaggccggttccttactgacacagctccttgcttccactaggggcgatggaatcaagtctcagtaggattattaaatatggaatggtagcaagctattttttaatc

SEQ ID NO: 13108 - DNA, 122 bp, Homo sapiens
  misc_feature (61)..(62): /note="This region represents a CpG dinucleotide"
  misc_feature (61)..(61): /note="Nucleotide may be methylated to form 5-methylcytosine"
atattaaaaatgcagcctatttctgataatttatgcgcattctcataaacacattacactcgtcacagtacatttacgagcaccaggcctaccagtggggaaaagttaacacctacctaatg

SEQ ID NO: 13109 - DNA, 122 bp, Homo sapiens
  misc_feature (61)..(62): /note="This region represents a CpG dinucleotide"
  misc_feature (61)..(61): /note="Nucleotide may be methylated to form 5-methylcytosine"
tgcctcagcaattttctgacatttatgatagactggattctgcatttcaccagtcagctacgtgaggagagtctaccttcatcaccctccaacatctttgattccagcccatgtataaccag

SEQ ID NO: 13110 - DNA, 122 bp, Homo sapiens
  misc_feature (61)..(62): /note="This region represents a CpG dinucleotide"
  misc_feature (61)..(61): /note="Nucleotide may be methylated to form 5-methylcytosine"
ccgtcgataagctcacttaattctgacagcaactctagtgtaccaatgaccagtgctgggcgctgtgaatcagcaggactggcagctcaccctgattagctggtgatttcctgtgttcttgg

SEQ ID NO: 13111 - DNA, 122 bp, Homo sapiens
  misc_feature (61)..(62): /note="This region represents a CpG dinucleotide"
  misc_feature (61)..(61): /note="Nucleotide may be methylated to form 5-methylcytosine"
ctctggcaaaagaatggcataccttagatccagcttgctccttcaaccttagggctgagacgaagagatatgtgggacatagctacagggaaccttagctcacatgtagtgtgagtaagaaa

SEQ ID NO: 13112 - DNA, 122 bp, Homo sapiens
  misc_feature (61)..(62): /note="This region represents a CpG dinucleotide"
  misc_feature (61)..(61): /note="Nucleotide may be methylated to form 5-methylcytosine"
cctagtgacacgataaacactcaatcctcacggtgcactaactcatagatgatttattgccgtaagtaactaaacaagagaagagacaggctgtgggtttggtcaagacaatcagcattccc

SEQ ID NO: 13113 - DNA, 122 bp, Homo sapiens
  misc_feature (61)..(62): /note="This region represents a CpG dinucleotide"
  misc_feature (61)..(61): /note="Nucleotide may be methylated to form 5-methylcytosine"
gtaggccacacctacttttggaggccattgtttcacaataattggttggttgatttgtcccggctgacctgaatgtctgcctggctttctgtctttagacttctcttatgctcactttcctt

SEQ ID NO: 13114 - DNA, 122 bp, Homo sapiens
  misc_feature (61)..(62): /note="This region represents a CpG dinucleotide"
  misc_feature (61)..(61): /note="Nucleotide may be methylated to form 5-methylcytosine"
ctgtgtcgtgtcagagggtgcttagcataccagaggacagctctttgtctatatgtgtgacgctcctagcagactagatttgagatcagcgtctctgctgtttgagatcagagtccccgcct

SEQ ID NO: 13115 - DNA, 122 bp, Homo sapiens
  misc_feature (61)..(62): /note="This region represents a CpG dinucleotide"
  misc_feature (61)..(61): /note="Nucleotide may be methylated to form 5-methylcytosine"
ctcttttacttcatttactcctctcagttgggtatgagtacaccaacttctaaccagttccgcaaggaacatcacttactatgggaggcctctttctaatcatccagttagtcatttcctct

SEQ ID NO: 13116 - DNA, 122 bp, Homo sapiens
  misc_feature (61)..(62): /note="This region represents a CpG dinucleotide"
  misc_feature (61)..(61): /note="Nucleotide may be methylated to form 5-methylcytosine"
aggactttacagcttctctttgacatatctgaatcatcagcatcactattcttgtgctttcgttaggaaaaatcaggatgacttgagcaccagcactgtgataccacgacaggtgctctgat

SEQ ID NO: 13117 - DNA, 122 bp, Homo sapiens
  misc_feature (61)..(62): /note="This region represents a CpG dinucleotide"
  misc_feature (61)..(61): /note="Nucleotide may be methylated to form 5-methylcytosine"
tctgcttccgctatcatattatgagccaattatctgttcttctcttggggttacaatcaccgcctctctgttcttggtacctagcccagtggtgctcattaaatgtttattaatgaatgtga

SEQ ID NO: 13118 - DNA, 122 bp, Homo sapiens
  misc_feature (61)..(62): /note="This region represents a CpG dinucleotide"
  misc_feature (61)..(61): /note="Nucleotide may be methylated to form 5-methylcytosine"
cctacaaaataaaagtcataaatctgaatgagttcaggttctatttttgtatatttatttcgtaactctattctggatgactttccgaataattgcaatgctatgaggtttgtaaaatgtat

SEQ ID NO: 13119 - DNA, 122 bp, Homo sapiens
  misc_feature (61)..(62): /note="This region represents a CpG dinucleotide"
  misc_feature (61)..(61): /note="Nucleotide may be methylated to form 5-methylcytosine"
tgccggcttatgctgttggaatcacatcttagtagttacataatgccatcaggaccagtacgagactggtttggtgattgagcccatttcctgggatttgttcctatgtattgcagacagat

SEQ ID NO: 13120 - DNA, 122 bp, Homo sapiens
  misc_feature (61)..(62): /note="This region represents a CpG dinucleotide"
  misc_feature (61)..(61): /note="Nucleotide may be methylated to form 5-methylcytosine"
cacacaatcacaaggccccacaataggccgtctgcaggctgaggaacaaggaagccagtccgagtcccaaaacctcaaaagtaaggaagtggacagttcagccttcagtctgtggctgaagg

SEQ ID NO: 13121 - DNA, 122 bp, Homo sapiens
  misc_feature (61)..(62): /note="This region represents a CpG dinucleotide"
  misc_feature (61)..(61): /note="Nucleotide may be methylated to form 5-methylcytosine"
ttctttaacctaattctaaacttcaggcttgttgctcttctgatcagccttctcaagctccgtgaggtttggcagcaattttcctgtgtttcaaagaagagcctccagagagagcgcaaagg

SEQ ID NO: 13122 - DNA, 122 bp, Homo sapiens
  misc_feature (61)..(62): /note="This region represents a CpG dinucleotide"
  misc_feature (61)..(61): /note="Nucleotide may be methylated to form 5-methylcytosine"
cacaggctgccctggagcaattttccttctccattttctacgcctgggagcaggtgtgtccgctgtgacgtcctttaaccaggatgctggcagcttcagcttagacgcttcacccaaagcca

SEQ ID NO: 13123 - DNA, 122 bp, Homo sapiens
  misc_feature (61)..(62): /note="This region represents a CpG dinucleotide"
  misc_feature (61)..(61): /note="Nucleotide may be methylated to form 5-methylcytosine"
ggttaatgcttcctttgtctgacacatctatttaagccatatgtctggttagtttcagcacgttactaggccagttcagcaatgctcgaaagcaattcaattttcaaagaacagttctcgag

SEQ ID NO: 13124 - DNA, 122 bp, Homo sapiens
  misc_feature (61)..(62): /note="This region represents a CpG dinucleotide"
  misc_feature (61)..(61): /note="Nucleotide may be methylated to form 5-methylcytosine"
aatttctagccacttcttgttgctgttttggtgagctttactgttgcaggtatctgcttacgacaacgtgtgatgtgaatcatctcagcatgagcagttcaactctccagtaaattgtatat

SEQ ID NO: 13125 - DNA, 122 bp, Homo sapiens
  misc_feature (61)..(62): /note="This region represents a CpG dinucleotide"
  misc_feature (61)..(61): /note="Nucleotide may be methylated to form 5-methylcytosine"
caggtgctgcctcaccagggatatccaaggcataaccttggacaagtcatgtggctccctcggtgtctcattgtcttcctgtgtaagacagggctgttgaagcttgcttggctatgaagatt

SEQ ID NO: 13126 - DNA, 122 bp, Homo sapiens
  misc_feature (61)..(62): /note="This region represents a CpG dinucleotide"
  misc_feature (61)..(61): /note="Nucleotide may be methylated to form 5-methylcytosine"
cctgagaagttttccagtaggatagaatgtgaaagcccaaacaatgacctcagcagattccgaggcttcctgtgagtaatacatgatgaacatttgtgggtgtaagtggaattgtgtgttgc

SEQ ID NO: 13127 - DNA, 122 bp, Homo sapiens
  misc_feature (61)..(62): /note="This region represents a CpG dinucleotide"
  misc_feature (61)..(61): /note="Nucleotide may be methylated to form 5-methylcytosine"
ttcagcgtgcctcagtttccccagctgtaatgtggagtggcacttctctcatagggttgccgtgaaccttaaatgagatagttcctgtgatgagctcaggagcgccaagcacagagctcaat

SEQ ID NO: 13128 - DNA, 122 bp, Homo sapiens
  misc_feature (61)..(62): /note="This region represents a CpG dinucleotide"
  misc_feature (61)..(61): /note="Nucleotide may be methylated to form 5-methylcytosine"
tttctgcagcccctgcaggtcaacccttgactgacctccatttactcatacttagattaccgaaagctctccattttcccctgtaaaacacaaatacggagaatcaaatgtactgctgactc

SEQ ID NO: 13129 - DNA, 122 bp, Homo sapiens
  misc_feature (61)..(62): /note="This region represents a CpG dinucleotide"
  misc_feature (61)..(61): /note="Nucleotide may be methylated to form 5-methylcytosine"
cctttcatgtgatccaagtaaataaagtaagaacttgttgagcatgctcctcaagcatgccgtgatttagtcagccatctgaggtgatacacctacggagtatgctattcctctaacacttt

SEQ ID NO: 13130 - DNA, 122 bp, Homo sapiens
  misc_feature (61)..(62): /note="This region represents a CpG dinucleotide"
  misc_feature (61)..(61): /note="Nucleotide may be methylated to form 5-methylcytosine"
cactcatcttttcatgttgctggaagtcagctcctcttagcggtgtgcagcttgggcttccggagttggctgggtctttgtgcttatcagcgataccctcctgtctcccatccctccctctc

SEQ ID NO: 13131 - DNA, 122 bp, Homo sapiens
  misc_feature (61)..(62): /note="This region represents a CpG dinucleotide"
  misc_feature (61)..(61): /note="Nucleotide may be methylated to form 5-methylcytosine"
tcagtgccaggcactggactaaatgctatataggaatttcctcatttgttcatcccagtgcgtggatgaggcaaggactattgttaggtgctaacatcaccctggcaggacagccaactgta

SEQ ID NO: 13132 - DNA, 122 bp, Homo sapiens
  misc_feature (61)..(62): /note="This region represents a CpG dinucleotide"
  misc_feature (61)..(61): /note="Nucleotide may be methylated to form 5-methylcytosine"
gcaggcataatcttgctcctttgttttcagctgggaaacctgaaacatagcaagtgtaagcggcttttctgactgtctgatttcaaagcctaatctgtttctacagcaccgtattgacttgc

SEQ ID NO: 13133 - DNA, 122 bp, Homo sapiens
  misc_feature (61)..(62): /note="This region represents a CpG dinucleotide"
  misc_feature (61)..(61): /note="Nucleotide may be methylated to form 5-methylcytosine"
gtattatctttcattgtaaatgagtaaaatgacatcagtctcctgtgaggatggggcatgcgagtcacccagagtctcttaaatcctggactcactggacctgcagtgctaaagagcagagc

SEQ ID NO: 13134 - DNA, 122 bp, Homo sapiens
  misc_feature (61)..(62): /note="This region represents a CpG dinucleotide"
  misc_feature (61)..(61): /note="Nucleotide may be methylated to form 5-methylcytosine"
gccaattcctaacccaaagttttcccaacagaaccttagtagaacaaaatgctttaagcacgtagtgtacaccctcattgcatgtcaaaaagaactggtattatttcaggaagaacaactca

SEQ ID NO: 13135 - DNA, 122 bp, Homo sapiens
  misc_feature (61)..(62): /note="This region represents a CpG dinucleotide"
  misc_feature (61)..(61): /note="Nucleotide may be methylated to form 5-methylcytosine"
agaaggcacaaaacacagaaatgggggttctcacactacagattaaggagtgtcccaggccgggcacggtggctcacacctgtaatcccagcactttgggaggctgaggcaggtggatcacc

SEQ ID NO: 13136 - DNA, 122 bp, Homo sapiens
  misc_feature (61)..(62): /note="This region represents a CpG dinucleotide"
  misc_feature (61)..(61): /note="Nucleotide may be methylated to form 5-methylcytosine"
tttggccttcagtattacatgaacctgctctgaaagacacaacactgtcacagatgtatgcggacagattaagctccagatggaaggctgtcaatgtcaatcagtcactgttcttacagcct

SEQ ID NO: 13137 - DNA, 122 bp, Homo sapiens
  misc_feature (61)..(62): /note="This region represents a CpG dinucleotide"
  misc_feature (61)..(61): /note="Nucleotide may be methylated to form 5-methylcytosine"
taaccttttgctgtacctggccttttacatcatcatgaaggtaagagcgggtgccgggagcggctacctcgggccctcgggcaggcgaaggcggggtcgcgtgaggccgcatctgcttctcc

SEQ ID NO: 13138 - DNA, 122 bp, Homo sapiens
  misc_feature (61)..(62): /note="This region represents a CpG dinucleotide"
  misc_feature (61)..(61): /note="Nucleotide may be methylated to form 5-methylcytosine"
aatgccatcactcccagtcattggagatcgtgggtgcccctgagggttacagatcaaggacgtgatatgttgaaagcacaggttttaggatgattagtagggttgaaaggtatgcatttctg

SEQ ID NO: 13139 - DNA, 122 bp, Homo sapiens
  misc_feature (61)..(62): /note="This region represents a CpG dinucleotide"
  misc_feature (61)..(61): /note="Nucleotide may be methylated to form 5-methylcytosine"
cgagggcgagggcgagggagagcctggtttctcacttctgcttcctccttgtggctcccacgctgtgccgagccattcagcctgcacaatccagacaatggatttgcctctgaagtaggggc

SEQ ID NO: 13140 - DNA, 122 bp, Homo sapiens
  misc_feature (61)..(62): /note="This region represents a CpG dinucleotide"
  misc_feature (61)..(61): /note="Nucleotide may be methylated to form 5-methylcytosine"
gggccactattgtatccgccttacgtaaccacatggagtgatggaaatgggtgagcagcccggaatgtaggcggtggcctggcccatgcatctccagagaccatgaagactgctcaagccct

SEQ ID NO: 13141 - DNA, 122 bp, Homo sapiens
  misc_feature (61)..(62): /note="This region represents a CpG dinucleotide"
  misc_feature (61)..(61): /note="Nucleotide may be methylated to form 5-methylcytosine"
gccattagggaagatagcactgagcctattatctcaagcacaaaagttctaggcacctgacggactcatgtcggcttggattaggtgaggaatcaaggataacatgattgacatcctctatt

SEQ ID NO: 13142 - DNA, 122 bp, Homo sapiens
  misc_feature (61)..(62): /note="This region represents a CpG dinucleotide"
  misc_feature (61)..(61): /note="Nucleotide may be methylated to form 5-methylcytosine"
ggggccttcctatgcctcatgcatcaggccctttggagccctgggagcagacggccatggcggctgaagctgcagtggatgcactcatgatgatgaggataataatagttgctaacatttct

SEQ ID NO: 13143 - DNA, 122 bp, Homo sapiens
  misc_feature (61)..(62): /note="This region represents a CpG dinucleotide"
  misc_feature (61)..(61): /note="Nucleotide may be methylated to form 5-methylcytosine"
aattctttaaggaagacataatgccatgtagaaaattacctgtccataatctctctctctcgtaaagtgcctggaccatttttatcattattgaaaataattctctgtatatttgaggaaaa

SEQ ID NO: 13144 - DNA, 122 bp, Homo sapiens
  misc_feature (61)..(62): /note="This region represents a CpG dinucleotide"
  misc_feature (61)..(61): /note="Nucleotide may be methylated to form 5-methylcytosine"
aactgggtctgtgatctcagcttcttccctaggccccaaggcatgcaaggtacaaggctgcgccccttcacccaggaattcaggcagacacagcagtaactcaaggataaaggagattgata

SEQ ID NO: 13145 - DNA, 122 bp, Homo sapiens
  misc_feature (61)..(62): /note="This region represents a CpG dinucleotide"
  misc_feature (61)..(61): /note="Nucleotide may be methylated to form 5-methylcytosine"
tctcccttcagacagaagccttacaaaaaaaccagattttgtaggttataaatcccccaacggacaagctctgggatgctattgcaaaactctagtttcagaagaatgcaccaagagggcgg

SEQ ID NO: 13146 - DNA, 122 bp, Homo sapiens
  misc_feature (61)..(62): /note="This region represents a CpG dinucleotide"
  misc_feature (61)..(61): /note="Nucleotide may be methylated to form 5-methylcytosine"
tgatggaaccatactattatgaagtagctttagcttattgcccaacttctctgagcagttcgacttgtttaatagttgccagagataaaacaggattaaaggataagtacaactgagttcat

SEQ ID NO: 13147 - DNA, 122 bp, Homo sapiens
  misc_feature (61)..(62): /note="This region represents a CpG dinucleotide"
  misc_feature (61)..(61): /note="Nucleotide may be methylated to form 5-methylcytosine"
aattgcagaatacatggttctgcttttgtgtgatttaaagcaggagtagtaaatacctggcgtggaggtagccactagaaacatggcatccatttcagtagagccttgatgtgaggtcttct

SEQ ID NO: 13148 - DNA, 122 bp, Homo sapiens
  misc_feature (61)..(62): /note="This region represents a CpG dinucleotide"
  misc_feature (61)..(61): /note="Nucleotide may be methylated to form 5-methylcytosine"
acgcatcaagaggatcttgtctttcactaattgtattttcaggcggggcccagaggctcacgcctgtaatccctgcactttggaaagctgaggggtggatcacttgaggtcaggagttcgag

SEQ ID NO: 13149 - DNA, 122 bp, Homo sapiens
  misc_feature (61)..(62): /note="This region represents a CpG dinucleotide"
  misc_feature (61)..(61): /note="Nucleotide may be methylated to form 5-methylcytosine"
tctagaactcctgagctcaagtgatctgcccgccttggcctcttgtgctgggattacaggcgtgagtcactgttcctagcagggctttctttaaatctgtaaattcctgttggtttcttgaa

SEQ ID NO: 13150 - DNA, 122 bp, Homo sapiens
  misc_feature (61)..(62): /note="This region represents a CpG dinucleotide"
  misc_feature (61)..(61): /note="Nucleotide may be methylated to form 5-methylcytosine"
cagagacagactcatgatagacagggcgacaggcataaccttcacaggggcgaagcgagacgcacacccgtctccagcagggagccacagtccacaggtggctactcctccctcccactgcc

SEQ ID NO: 13151 - DNA, 122 bp, Homo sapiens
  misc_feature (61)..(62): /note="This region represents a CpG dinucleotide"
  misc_feature (61)..(61): /note="Nucleotide may be methylated to form 5-methylcytosine"
atgatctcttccctaaaagtgttaccaatgaaagccatgctaacacttgttttcaagcaacggcatcaaaataaactggagaagtgggtgttgcaaaatactcatgaaaacgacgcctcctt

SEQ ID NO: 13152 - DNA, 122 bp, Homo sapiens
  misc_feature (61)..(62): /note="This region represents a CpG dinucleotide"
  misc_feature (61)..(61): /note="Nucleotide may be methylated to form 5-methylcytosine"
cagaagatttgacaggtgaacaaacacaagtccagaagggacatgactggcccaagatcacgccaccagctaatgccagacaggcgatgagaaccagttgtctcatacctttgccttgtaaa

SEQ ID NO: 13153 - DNA, 122 bp, Homo sapiens
  misc_feature (61)..(62): /note="This region represents a CpG dinucleotide"
  misc_feature (61)..(61): /note="Nucleotide may be methylated to form 5-methylcytosine"
tattcatttttgaggggagtatcacagaagggttctcactgcatcatagcaggagtagtgcgataccagtttgtttcatcacctggctaagatggtatctacattcatttgtcttactatgt

SEQ ID NO: 13154 - DNA, 122 bp, Homo sapiens
  misc_feature (61)..(62): /note="This region represents a CpG dinucleotide"
  misc_feature (61)..(61): /note="Nucleotide may be methylated to form 5-methylcytosine"
cactcagatggaacttaatcctggttgtcacagtatccaaacttttgtcctgctaccttccgaactcctcagagactgctacctgatttgaacccagatggaccgacctcagctgttgtcca

SEQ ID NO: 13155 - DNA, 122 bp, Homo sapiens
  misc_feature (61)..(62): /note="This region represents a CpG dinucleotide"
  misc_feature (61)..(61): /note="Nucleotide may be methylated to form 5-methylcytosine"
atccgcctgcctcggcctcccaaagtgctgggattacaggtgtgagccaccatacccagccgcttccaagctcatttctatggctgaagaatgccctcaggcagagagaagcaggaggttgt

SEQ ID NO: 13156 - DNA, 122 bp, Homo sapiens
  misc_feature (61)..(62): /note="This region represents a CpG dinucleotide"
  misc_feature (61)..(61): /note="Nucleotide may be methylated to form 5-methylcytosine"
ctgaaccctgatgtgattccagctctcctctttcttcacatctctgcacagcagcttatacgctcttactaatccaccatcccgctcttacaacagctctgagcagtgtcagggtgagcatt

SEQ ID NO: 13157 - DNA, 122 bp, Homo sapiens
  misc_feature (61)..(62): /note="This region represents a CpG dinucleotide"
  misc_feature (61)..(61): /note="Nucleotide may be methylated to form 5-methylcytosine"
ttagagtgacagggtgctgggctgtcaccaatcatacacaaagtggacaaggcattgagacgtagtcattttgacagagaagtgacattttgatacagcctaaaaacaaattgttaaatttt

SEQ ID NO: 13158 - DNA, 122 bp, Homo sapiens
  misc_feature (61)..(62): /note="This region represents a CpG dinucleotide"
  misc_feature (61)..(61): /note="Nucleotide may be methylated to form 5-methylcytosine"
tccaattattatccagatttaagagaagagaaaatggaggtttagagaggttaagccactcgttcattgtcacatggctagtaattggcagatccaggattaaaactctgtctggcccattt

SEQ ID NO: 13159 - DNA, 122 bp, Homo sapiens
  misc_feature (61)..(62): /note="This region represents a CpG dinucleotide"
  misc_feature (61)..(61): /note="Nucleotide may be methylated to form 5-methylcytosine"
tgtcaccagtgggggagggcctttcccagtgattgaggaccccaagtcatgcaggctttgcgtcacctgctggtatcatgtgctctcagctcatgagcagctttctaaggctgacaaactgc

SEQ ID NO: 13160 - DNA, 122 bp, Homo sapiens
  misc_feature (61)..(62): /note="This region represents a CpG dinucleotide"
  misc_feature (61)..(61): /note="Nucleotide may be methylated to form 5-methylcytosine"
taaatttgacaaatgtattaaaaattcaaggctaaatgggttgaacaaaagattggaagccgaggtaatctgtgagagatccatgcccagctggctaagcttttcatccttcggttcttacc

SEQ ID NO: 13161 - DNA, 122 bp, Homo sapiens
  misc_feature (61)..(62): /note="This region represents a CpG dinucleotide"
  misc_feature (61)..(61): /note="Nucleotide may be methylated to form 5-methylcytosine"
gtcactcactgactccatgaggattttttcacacatcattgcaacacaggcagtgactgacgccaccacctttgccctggaggctggtttctgggccctgccggtgcgggacataaaggccg

SEQ ID NO: 13162 - DNA, 122 bp, Homo sapiens
  misc_feature (61)..(62): /note="This region represents a CpG dinucleotide"
  misc_feature (61)..(61): /note="Nucleotide may be methylated to form 5-methylcytosine"
ttgctaagggaaatgaaaagcttacaagaaaacacattttggttgtgtaacagacacggacgatgccagacaactgtctgggttcatgtaaagtcagagggggaattacacaaacagggata

SEQ ID NO: 13163 - DNA, 122 bp, Homo sapiens
  misc_feature (61)..(62): /note="This region represents a CpG dinucleotide"
  misc_feature (61)..(61): /note="Nucleotide may be methylated to form 5-methylcytosine"
agaggtcttgctatgttgcccaggctggtctcaaactcctggcctcatgccatcttcctgcgtaagcttcccaaagcactgagattatatgccttagccactgtgcctggccccattgtgct

SEQ ID NO: 13164 - DNA, 122 bp, Homo sapiens
  misc_feature (61)..(62): /note="This region represents a CpG dinucleotide"
  misc_feature (61)..(61): /note="Nucleotide may be methylated to form 5-methylcytosine"
cccagctcaaaactagagtatttctatcctcctgacagaatgactaagttagaactgcctcgtactctatatggctgagatgcagaaaatgccaaaacaattggtcacgactcaattcaggt

SEQ ID NO: 13165 - DNA, 122 bp, Homo sapiens
  misc_feature (61)..(62): /note="This region represents a CpG dinucleotide"
  misc_feature (61)..(61): /note="Nucleotide may be methylated to form 5-methylcytosine"
caactccttcctttccgactcatccttcctgaggccccgcagtcctgcacacggtggtgacggacttccatttgtgtccagtgtaaaagcaaatcccatcataacaacatgtctttgagagt

SEQ ID NO: 13166 - DNA, 122 bp, Homo sapiens
  misc_feature (61)..(62): /note="This region represents a CpG dinucleotide"
  misc_feature (61)..(61): /note="Nucleotide may be methylated to form 5-methylcytosine"
gcttagaaagcctcagtgacaaggccacacagacaggaaggggtggaattgagattcatacgaagtccatccgacctccaggctgtgttgttgctatggggcttcatggctcatgttggaaa

SEQ ID NO: 13167 - DNA, 122 bp, Homo sapiens
  misc_feature (61)..(62): /note="This region represents a CpG dinucleotide"
  misc_feature (61)..(61): /note="Nucleotide may be methylated to form 5-methylcytosine"
atatcacttattatagttcatagtttccttctaataggtatatacttaccctagtacctacgcataatcctgtagtgatccattccttaatattgcttttcatagttcacagttatacattt

SEQ ID NO: 13168 - DNA, 122 bp, Homo sapiens
  misc_feature (61)..(62): /note="This region represents a CpG dinucleotide"
  misc_feature (61)..(61): /note="Nucleotide may be methylated to form 5-methylcytosine"
aaggacaagttgctatgactagtcaacttttcatgggacaggccagcagaaagtcatcgccgctggctgcccaaggtacctcaaatgactcatgcaagtcctttagatctctgtgtatctct

SEQ ID NO: 13169 - DNA, 122 bp, Homo sapiens
  misc_feature (61)..(62): /note="This region represents a CpG dinucleotide"
  misc_feature (61)..(61): /note="Nucleotide may be methylated to form 5-methylcytosine"
ccagctggtcctcattgcaggttgggggagggatacagggttgtagaagagctccagaatcggccccaaataggtgagatcagagttctgccattgaaaggcttcttgccctccttgggcca

SEQ ID NO: 13170 - DNA, 122 bp, Homo sapiens
  misc_feature (61)..(62): /note="This region represents a CpG dinucleotide"
  misc_feature (61)..(61): /note="Nucleotide may be methylated to form 5-methylcytosine"
acaagctccctacttacttgctctgtgaccttagcaagtcactcaatcatctcagttgggcgtcctcacttgtcacacagagtcaccacacatgctgagttgccaagggatgacatgagaca

SEQ ID NO: 13171 - DNA, 122 bp, Homo sapiens
  misc_feature (61)..(62): /note="This region represents a CpG dinucleotide"
  misc_feature (61)..(61): /note="Nucleotide may be methylated to form 5-methylcytosine"
tcttgcagaggaggaaactgaagctctgagaagttgagtaactcgcccaagatctcacagcggaaagtggtagagctgcaacttacacttcggtttgttgactccaaagcctgtgcttttca

SEQ ID NO: 13172 - DNA, 122 bp, Homo sapiens
  misc_feature (61)..(62): /note="This region represents a CpG dinucleotide"
  misc_feature (61)..(61): /note="Nucleotide may be methylated to form 5-methylcytosine"
aagtcagctttcaaatgttgaaaaggtgaatgaagaataaaataggaagaataaaatcagcgtaaagaagtaaagcattctttgagggcagttaagtatatgtagtcttctgcccaagagat

SEQ ID NO: 13173 - DNA, 122 bp, Homo sapiens
  misc_feature (61)..(62): /note="This region represents a CpG dinucleotide"
  misc_feature (61)..(61): /note="Nucleotide may be methylated to form 5-methylcytosine"
tgaagtgagttgtccacaattaggagcagagtggggattagaaaccagttgtcagtttcccgggtcagggatctttccacacagttccagagaggaagtcctggctccaggcagaggaatga

SEQ ID NO: 13174 - DNA, 122 bp, Homo sapiens
  misc_feature (61)..(62): /note="This region represents a CpG dinucleotide"
  misc_feature (61)..(61): /note="Nucleotide may be methylated to form 5-methylcytosine"
ccctctagcctacaagagattaaaaggcctaaatctatcaacacctcatatccttgtttacgtaagtctccaccagaaatactgttaactctcatgcccctactactctacacatccctctc

SEQ ID NO: 13175 - DNA, 122 bp, Homo sapiens
  misc_feature (61)..(62): /note="This region represents a CpG dinucleotide"
  misc_feature (61)..(61): /note="Nucleotide may be methylated to form 5-methylcytosine"
tccagctgatacagtttgactgtgtccccatctaaattgcatctggtattgtaatcctttcgatttaggctattgcgccacagagcctgcttgcaggaattgtaatcctatttgtaatcccc

SEQ ID NO: 13176 - DNA, 122 bp, Homo sapiens
  misc_feature (61)..(62): /note="This region represents a CpG dinucleotide"
  misc_feature (61)..(61): /note="Nucleotide may be methylated to form 5-methylcytosine"
cactcccccaaatacccacaaatctagctgtcttacttgttcaaagctctgctgaaacatcgtcttatcagataggtctttcctgaccagtttatccaaataatagttccaccccatcactc

SEQ ID NO: 13177 - DNA, 122 bp, Homo sapiens
  misc_feature (61)..(62): /note="This region represents a CpG dinucleotide"
  misc_feature (61)..(61): /note="Nucleotide may be methylated to form 5-methylcytosine"
aagcagacaaggtggtggtcaatctgaaaacctgacacacaaggcacgaggaactcatagcgtaagcatctcattgccccattccttttactgtaaggagtgctaaagtaaagttgtcataa

SEQ ID NO: 13178 - DNA, 122 bp, Homo sapiens
  misc_feature (61)..(62): /note="This region represents a CpG dinucleotide"
  misc_feature (61)..(61): /note="Nucleotide may be methylated to form 5-methylcytosine"
ctctactgtaattcccatcttgataaataggttctgttgagccagcgggcaaggtgaccccgttgggtggttacaattagacagtcatgcatcacttaacaatgggaatacattctaagaaa

SEQ ID NO: 13179 - DNA, 122 bp, Homo sapiens
  misc_feature (61)..(62): /note="This region represents a CpG dinucleotide"
  misc_feature (61)..(61): /note="Nucleotide may be methylated to form 5-methylcytosine"
catgaatgagttgagattgcagttttcagaagcacaggtctcgtccattattctgataaccgatctctttactgccttacaatacatcttattttgtttcttaacttcactgtgtttatatc

SEQ ID NO: 13180 - DNA, 122 bp, Homo sapiens
  misc_feature (61)..(62): /note="This region represents a CpG dinucleotide"
  misc_feature (61)..(61): /note="Nucleotide may be methylated to form 5-methylcytosine"
cgcctcaagcccctagggcaggcgctaggcgttccggattgtcgcgccctccgcctggttcggcaggtctgtccgcggccccttcacgttggcctccagctctcgtgccttccgctggtccc

SEQ ID NO: 13181 - DNA, 122 bp, Homo sapiens
  misc_feature (61)..(62): /note="This region represents a CpG dinucleotide"
  misc_feature (61)..(61): /note="Nucleotide may be methylated to form 5-methylcytosine"
tcatcccatctggctctccagctgcttccctttctcatggcctcttcacgagcaagtacacgggttctttaagattggtgtgcatcacgatcacctgaggagcttgttaagtcagatcgcta

SEQ ID NO: 13182 - DNA, 122 bp, Homo sapiens
  misc_feature (61)..(62): /note="This region represents a CpG dinucleotide"
  misc_feature (61)..(61): /note="Nucleotide may be methylated to form 5-methylcytosine"
acgctgcaggcaattgtaatactgtggtaagtatttgtgcatctaaacacagaaaaggtacggtaaagacactgtgtaaaagataagaaatgatacacctgtataggggacttaccatgaac

SEQ ID NO: 13183 - DNA, 122 bp, Homo sapiens
  misc_feature (61)..(62): /note="This region represents a CpG dinucleotide"
  misc_feature (61)..(61): /note="Nucleotide may be methylated to form 5-methylcytosine"
ccagcctgatttcttatttaattatcacacaagcctgccaagaggtatcaatccatatttcgtaaatgagggaactatcagagaagttttgttgcttacccagcattacacagtaagaaagt

SEQ ID NO: 13184 - DNA, 122 bp, Homo sapiens
  misc_feature (61)..(62): /note="This region represents a CpG dinucleotide"
  misc_feature (61)..(61): /note="Nucleotide may be methylated to form 5-methylcytosine"
gaaattgtgtcacaagcacttgtggggctgggttcacctctagcaacctctgctgagatacgagtgtgcttggaaattgtaagcattccagtcatgggtaaattcaagccaaggactctttg

SEQ ID NO: 13185 - DNA, 122 bp, Homo sapiens
  misc_feature (61)..(62): /note="This region represents a CpG dinucleotide"
  misc_feature (61)..(61): /note="Nucleotide may be methylated to form 5-methylcytosine"
ttgcagcaactgtatatgttttcattaaatctgcagataaatgatcaggcatgtatccggcgttgttccactggcactgctgtggactaaacaatggccagtgttctgatgtgaatcatttg

SEQ ID NO: 13186 - DNA, 122 bp, Homo sapiens
  misc_feature (61)..(62): /note="This region represents a CpG dinucleotide"
  misc_feature (61)..(61): /note="Nucleotide may be methylated to form 5-methylcytosine"
agttcatacttggctctgagccactatcgtctgtaaaaggtataattgccttgctaacaccgtacaggggctcttgaggctcggcttggctcaacatggcttaacacagcgggtgcactggc

SEQ ID NO: 13187 - DNA, 122 bp, Homo sapiens
  misc_feature (61)..(62): /note="This region represents a CpG dinucleotide"
  misc_feature (61)..(61): /note="Nucleotide may be methylated to form 5-methylcytosine"
gggagagggtaattagaggcccaggtgctggagttgccacctacctgcccctgcctgtctcgtgtcctggtgtggggctggccagctttgcctatcgtgccctgtattctaacactaatcct

SEQ ID NO: 13188 - DNA, 122 bp, Homo sapiens
  misc_feature (61)..(62): /note="This region represents a CpG dinucleotide"
  misc_feature (61)..(61): /note="Nucleotide may be methylated to form 5-methylcytosine"
caggtgcagctgtgcgccctcaggcttagaggcttagaattctctgcagcacctaaaggccgtgagcttggattcaaaccagagccccttctggtcctggagtctgggacgaccgcagcccc

SEQ ID NO: 13189 - DNA, 122 bp, Homo sapiens
  misc_feature (61)..(62): /note="This region represents a CpG dinucleotide"
  misc_feature (61)..(61): /note="Nucleotide may be methylated to form 5-methylcytosine"
gagccaggaggagaacacgcagctctgaactggctgagcgaggtggccacagggccagggcgggcgctgggtggagggcaggaggcaatgacactaatgctttttttttttttttttaactt

SEQ ID NO: 13190 - DNA, 122 bp, Homo sapiens
  misc_feature (61)..(62): /note="This region represents a CpG dinucleotide"
  misc_feature (61)..(61): /note="Nucleotide may be methylated to form 5-methylcytosine"
ccacccagaaatgatgacatggctagtgaggctgacagtcttgctgtaattgggagaaaacgagctgcagcacatttggcagattgagtcaccagcagccaatgtcaggggttgtgcaggca

SEQ ID NO: 13191 - DNA, 122 bp, Homo sapiens
  misc_feature (61)..(62): /note="This region represents a CpG dinucleotide"
  misc_feature (61)..(61): /note="Nucleotide may be methylated to form 5-methylcytosine"
ttgctgagcaagcctctcagcagacacactttgaaacctgagcgaacacacaagaatcatcgatgctggcatcccctggtcctcaaaacactggtttctcctgccctatcttgtcatccatt

SEQ ID NO: 13192 - DNA, 122 bp, Homo sapiens
  misc_feature (61)..(62): /note="This region represents a CpG dinucleotide"
  misc_feature (61)..(61): /note="Nucleotide may be methylated to form 5-methylcytosine"
gaggtagaggaaatgaaggagtcaaagcttccaggtgataaaggacttgtgttgatgtctcgggccaagcatcatgccatctctgctaaactgaacaagcccttcctgtttgacaccaagcc

SEQ ID NO: 13193 - DNA, 122 bp, Homo sapiens
  misc_feature (61)..(62): /note="This region represents a CpG dinucleotide"
  misc_feature (61)..(61): /note="Nucleotide may be methylated to form 5-methylcytosine"
agtgggaaatgagctacagataatctgtaaccaaaagggcatggctgtgtcccagtaaaccgtattaacaaaaacaggctgcaggctgaatttggtccaaccaagggcttacttagtttgct

SEQ ID NO: 13194 - DNA, 122 bp, Homo sapiens
  misc_feature (61)..(62): /note="This region represents a CpG dinucleotide"
  misc_feature (61)..(61): /note="Nucleotide may be methylated to form 5-methylcytosine"
gctgactaagaagcccgaggataaccacacccagtgccagctggtgcctgtggtggagatcggcatcagtgagcgccagaatgctgagcagcatgtcacccagctcatgtccaccgagcctc

SEQ ID NO: 13195 - DNA, 122 bp, Homo sapiens
  misc_feature (61)..(62): /note="This region represents a CpG dinucleotide"
  misc_feature (61)..(61): /note="Nucleotide may be methylated to form 5-methylcytosine"
acaaaagaaaatttgcatctgactgctcttaactacacaagggaatcaggcttaacaacacgctcagcagctgtgtgactatggccaatttgcttaagctctgtgcttcagtttcctactgc

SEQ ID NO: 13196 - DNA, 122 bp, Homo sapiens
  misc_feature (61)..(62): /note="This region represents a CpG dinucleotide"
  misc_feature (61)..(61): /note="Nucleotide may be methylated to form 5-methylcytosine"
gtctcacttcaattatgctttcgagggattatagaattagcaattccagttttgatggcacgagctctgtcaaatcagagagacagatgtgagctcatgtaactgagaggcttccatctgtt

SEQ ID NO: 13197 - DNA, 122 bp, Homo sapiens
  misc_feature (61)..(62): /note="This region represents a CpG dinucleotide"
  misc_feature (61)..(61): /note="Nucleotide may be methylated to form 5-methylcytosine"
atacatctaggacacaaactgaaacctgctcatctgactcatcacagagcctgatgagtacgtaagaggtacataagtctttgttaaattaatttgatgagccataacaaaatcaataaagt

SEQ ID NO: 13198 - DNA, 122 bp, Homo sapiens
  misc_feature (61)..(62): /note="This region represents a CpG dinucleotide"
  misc_feature (61)..(61): /note="Nucleotide may be methylated to form 5-methylcytosine"
aaccctaatataaatggagtgggcgttcccactagctatgggtcacccccttcgaaagcacgcctccagccatcagtgctgacttcctgtgtcatcgtgagatgactcaggatcctagagca

SEQ ID NO: 13199 - DNA, 122 bp, Homo sapiens
  misc_feature (61)..(62): /note="This region represents a CpG dinucleotide"
  misc_feature (61)..(61): /note="Nucleotide may be methylated to form 5-methylcytosine"
gaaacatcttcggatgcccaggcagctggaggtgtcacaccaggctcaccatttgcaagacgcctcaggattttgctcagacaccctcaggagacactccaggaggaagtctgccagctgcc

SEQ ID NO: 13200 - DNA, 122 bp, Homo sapiens
  misc_feature (61)..(62): /note="This region represents a CpG dinucleotide"
  misc_feature (61)..(61): /note="Nucleotide may be methylated to form 5-methylcytosine"
tgcaatgggccctgcaaattatgtagacaatcctgcctctggccctgtgggcagggcctgcgtctccttcccaggatagctgagtgaaggattagatactaagccttcatgatgggttttgg

SEQ ID NO: 13201 - DNA, 122 bp, Homo sapiens
  misc_feature (61)..(62): /note="This region represents a CpG dinucleotide"
  misc_feature (61)..(61): /note="Nucleotide may be methylated to form 5-methylcytosine"
ggaaattttctgagtcagagtatttgttaggttaattaggtgactcattatgggaccttacgcagattctgaatgggagttggtcactgaaaacacccaccatatgattgtgactagaggac

SEQ ID NO: 13202 - DNA, 122 bp, Homo sapiens
  misc_feature (61)..(62): /note="This region represents a CpG dinucleotide"
  misc_feature (61)..(61): /note="Nucleotide may be methylated to form 5-methylcytosine"
tcatccttagtcactggtttgtcagattaaaggagaactcacttatactttatgtaagtgcgtatgtttaagataaaatcaaactgcatggtgttaatgagttggaattaaaatcccttctt

SEQ ID NO: 13203 - DNA, 122 bp, Homo sapiens
  misc_feature (61)..(62): /note="This region represents a CpG dinucleotide"
  misc_feature (61)..(61): /note="Nucleotide may be methylated to form 5-methylcytosine"
cggctcacaggacagcttgctggggttgccagccggcccttgacttaaatagccctgccccgctgcattcctggcccagcccagcccagcccagcccacccctgcgtgtagtatcctccagc

SEQ ID NO: 13204 - DNA, 122 bp, Homo sapiens
  misc_feature (61)..(62): /note="This region represents a CpG dinucleotide"
  misc_feature (61)..(61): /note="Nucleotide may be methylated to form 5-methylcytosine"
caaacaaagcaggtggcccagaccaactttgagatgctctaggtgttggttcagagctggcgtcctgatgccatgcaggtttggctcaatcttgatcctgccactcattagctgtgtgacct

SEQ ID NO: 13205 - DNA, 122 bp, Homo sapiens
  misc_feature (61)..(62): /note="This region represents a CpG dinucleotide"
  misc_feature (61)..(61): /note="Nucleotide may be methylated to form 5-methylcytosine"
agtaagagcttaggtgctgaacacatgggtcagcattttaactattaaccgtactctcagcgttgaatcataatgtataacattctaacacatctactaaactgcatatactaatggatgct

SEQ ID NO: 13206 - DNA, 122 bp, Homo sapiens
  misc_feature (61)..(62): /note="This region represents a CpG dinucleotide"
  misc_feature (61)..(61): /note="Nucleotide may be methylated to form 5-methylcytosine"
gacatatgcaaattggcactgcaggcccagggtgcagctgatgcaaaggccccagagctacgctggcttggctttgaggagcagaagggaggtaggaacacagtgagcatgaggagagtgtt

SEQ ID NO: 13207 - DNA, 122 bp, Homo sapiens
  misc_feature (61)..(62): /note="This region represents a CpG dinucleotide"
  misc_feature (61)..(61): /note="Nucleotide may be methylated to form 5-methylcytosine"
catactactgttttttgtttttgttctttatgagagacggtcttactgtctctcccaggccggagtgctgtgacaccatcagaactctgtgcagccttggctcaagtcatcatcctggctca

SEQ ID NO: 13208 - DNA, 122 bp, Homo sapiens
  misc_feature (61)..(62): /note="This region represents a CpG dinucleotide"
  misc_feature (61)..(61): /note="Nucleotide may be methylated to form 5-methylcytosine"
ttaattttcctctaagcagctgcctacagtctatgattcactggccatgaattgcaattgcgttatcacctgagaacacaaaaagactttggagaattagcatataagccaggaggggattt

SEQ ID NO: 13209 - DNA, 122 bp, Homo sapiens
  misc_feature (61)..(62): /note="This region represents a CpG dinucleotide"
  misc_feature (61)..(61): /note="Nucleotide may be methylated to form 5-methylcytosine"
gaaatggccttgaggcaatggcttaaatgattttttaaatctgtttttctctcatgtgagcgtctagaccgggaggcggccagaagtggccggcagctgtagagagagttttcctgggacac

SEQ ID NO: 13210 - DNA, 122 bp, Homo sapiens
  misc_feature (61)..(62): /note="This region represents a CpG dinucleotide"
  misc_feature (61)..(61): /note="Nucleotide may be methylated to form 5-methylcytosine"
tgaggattgtcaagttaccagaaagaaaagaaaccaggccagccagccagtcagcctgcacgcactacagaaaagattaacatggcttttcttgtaacagaggtcatagatcagtcccagtg

SEQ ID NO: 13211 - DNA, 122 bp, Homo sapiens
  misc_feature (61)..(62): /note="This region represents a CpG dinucleotide"
  misc_feature (61)..(61): /note="Nucleotide may be methylated to form 5-methylcytosine"
tcgtgcctggcagatgattttacttttgaaaaatttgttgagacttgttttgtggtctaacgtgtcatctatcctggaagatattccatgttctgatgagaagaatgtgtattctgcagctg

SEQ ID NO: 13212 - DNA, 122 bp, Homo sapiens
  misc_feature (61)..(62): /note="This region represents a CpG dinucleotide"
  misc_feature (61)..(61): /note="Nucleotide may be methylated to form 5-methylcytosine"
actcatctgaaaaagtcatattaaaaacaaaggtgttctggctgtgtttggggtgaagcccgtgcccaggcccactctgctgcatcctcatttgtgggttgaaaggagagacgtgtgtttct

SEQ ID NO: 13213 - DNA, 122 bp, Homo sapiens
  misc_feature (61)..(62): /note="This region represents a CpG dinucleotide"
  misc_feature (61)..(61): /note="Nucleotide may be methylated to form 5-methylcytosine"
ggagccccagagaaaatacaggatttcaatgatgaaaaggagaagctgttggaaagggaacgtaagaaagcactacttcaagccctggaggagaaatggaaggcaaggcagagatcttctgg

SEQ ID NO: 13214 - DNA, 122 bp, Homo sapiens
  misc_feature (61)..(62): /note="This region represents a CpG dinucleotide"
  misc_feature (61)..(61): /note="Nucleotide may be methylated to form 5-methylcytosine"
cacaaacacacgacaaatatttattttaaggaattggctgacatgattcatgattatgtgcgctagcaagtccaaaaccttgactagggagtcagcaagctagagaccaagggaacagttta

SEQ ID NO: 13215 - DNA, 122 bp, Homo sapiens
  misc_feature (61)..(62): /note="This region represents a CpG dinucleotide"
  misc_feature (61)..(61): /note="Nucleotide may be methylated to form 5-methylcytosine"
ccagaacattctggcacaggtgccagtccagcctcagtgctccagccctgctgcagccagcgaagccaagtacatatttcatggagaatagtcagtcataaacgctgtggaaaactgaatga

SEQ ID NO: 13216 - DNA, 122 bp, Homo sapiens
  misc_feature (61)..(62): /note="This region represents a CpG dinucleotide"
  misc_feature (61)..(61): /note="Nucleotide may be methylated to form 5-methylcytosine"
ctgctcccaaggcctccctgggctgctgtgggctcctggggaggtggccctcgtggcccacgctccatgccagtggctcacgctctgctcctggctaccccagagggagttgtcacgctaca

SEQ ID NO: 13217 - DNA, 122 bp, Homo sapiens
  misc_feature (61)..(62): /note="This region represents a CpG dinucleotide"
  misc_feature (61)..(61): /note="Nucleotide may be methylated to form 5-methylcytosine"
gggtcaagtcaacttctgtggagtgatttgtgtgtttctcacgatatgcaaacagacatgcgtacaaaaagaaacatgtacatgctgcatagttagcatagaggaggaagtggttagtgctg

SEQ ID NO: 13218 - DNA, 122 bp, Homo sapiens
  misc_feature (61)..(62): /note="This region represents a CpG dinucleotide"
  misc_feature (61)..(61): /note="Nucleotide may be methylated to form 5-methylcytosine"
attaaagacttcaagaagtcctacattaagaaatctgtgtgactgtttaacccaacatagcgcagatccacataacctctttacttaggtttgtttattttactacaatcaccataacaagt

SEQ ID NO: 13219 - DNA, 122 bp, Homo sapiens
  misc_feature (61)..(62): /note="This region represents a CpG dinucleotide"
  misc_feature (61)..(61): /note="Nucleotide may be methylated to form 5-methylcytosine"
aggtcaagctaaacaaggtctagacaaaacttaaacaacaaaacaaagtcaggcactgtacgtaggtcacaatgactgtataactagcttgaagaagaaatgaacaaaactttctttgctac

SEQ ID NO: 13220 - DNA, 122 bp, Homo sapiens
  misc_feature (61)..(62): /note="This region represents a CpG dinucleotide"
  misc_feature (61)..(61): /note="Nucleotide may be methylated to form 5-methylcytosine"
aattgtcaactccttctctttcctgcctcctcccctcttttgacatggcctctttggtggcgttgtagtgactaacaaacagtatagattttggagcagccagacagacctgaatttaattc

SEQ ID NO: 13221 - DNA, 122 bp, Homo sapiens
  misc_feature (61)..(62): /note="This region represents a CpG dinucleotide"
  misc_feature (61)..(61): /note="Nucleotide may be methylated to form 5-methylcytosine"
tggggaagtctgcattcctcccagtcttgaacaattactgacaagtgctttatttgtctgcgctcattagggtcaatctgattcgtctagggatatgagaagtgctatttgagatgcctttg

SEQ ID NO: 13222 - DNA, 122 bp, Homo sapiens
  misc_feature (61)..(62): /note="This region represents a CpG dinucleotide"
  misc_feature (61)..(61): /note="Nucleotide may be methylated to form 5-methylcytosine"
attagtcctttaccaggtttgccttaaaactgagtcactgtgtgcctggcctttactcagcgcttcctcccatgtcgtgactgttataatgcatcattacttcctcactatgattcatctag

SEQ ID NO: 13223 - DNA, 122 bp, Homo sapiens
  misc_feature (61)..(62): /note="This region represents a CpG dinucleotide"
  misc_feature (61)..(61): /note="Nucleotide may be methylated to form 5-methylcytosine"
agccagccgtgactctgcccctccctctgaagaagagaactttatagaagggaaatcaggcgacaaagtcaaggaaagaggtgatagatttagaagaccttgaagggaaaatgaatccattg

SEQ ID NO: 13224 - DNA, 122 bp, Homo sapiens
  misc_feature (61)..(62): /note="This region represents a CpG dinucleotide"
  misc_feature (61)..(61): /note="Nucleotide may be methylated to form 5-methylcytosine"
gcagacagtaaatgaaggtggcacagggttctctggcgtttgttgtattgatgcgcccagcgaaaggaaatttggcagctctttagaggtaatctgccttacaagggaccgtgagctgactg

SEQ ID NO: 13225 - DNA, 122 bp, Homo sapiens
  misc_feature (61)..(62): /note="This region represents a CpG dinucleotide"
  misc_feature (61)..(61): /note="Nucleotide may be methylated to form 5-methylcytosine"
ggggtctcgggttctagaaacttgtatgtcttcatctagctgggatcacccaggtggatgcgtgtctaaaaatcagttgagttgcttacttaagatgtgtgcgttttgtcagatgtaagtga

SEQ ID NO: 13226 - DNA, 122 bp, Homo sapiens
  misc_feature (61)..(62): /note="This region represents a CpG dinucleotide"
  misc_feature (61)..(61): /note="Nucleotide may be methylated to form 5-methylcytosine"
caaccccaaccagagtgacctgattgagcaggcagccgagatgctttatggattgatccacgcccgctacatccttaccaaccgtggcatcgcccagatggtgaggcctctctgctcctacc

SEQ ID NO: 13227 - DNA, 122 bp, Homo sapiens
  misc_feature (61)..(62): /note="This region represents a CpG dinucleotide"
  misc_feature (61)..(61): /note="Nucleotide may be methylated to form 5-methylcytosine"
ctactcttcagggagaacagccacagtcatgccctagaaacctacttagggtgccattctcgctgccacttgacctgagacactgcctcttctagcactgtgtcactaccattagaccctgg

SEQ ID NO: 13228 - DNA, 122 bp, Homo sapiens
  misc_feature (61)..(62): /note="This region represents a CpG dinucleotide"
  misc_feature (61)..(61): /note="Nucleotide may be methylated to form 5-methylcytosine"
gctaatcccttggatgacagaatcatgattcaagaagatctcaagttttaactatagctacgttcacggagatgaaatttaataggaggcaatggtaaaatactggtttaaaaacatcacct

SEQ ID NO: 13229 - DNA, 122 bp, Homo sapiens
  misc_feature (61)..(62): /note="This region represents a CpG dinucleotide"
  misc_feature (61)..(61): /note="Nucleotide may be methylated to form 5-methylcytosine"
tagcctccacacctactgctttggccactttgtcatcggtccattgagcaagcaatgggacgattgggaaagaggctgactgacatccgtaagacaagtcatcttgaccacatgattattga

SEQ ID NO: 13230 - DNA, 122 bp, Homo sapiens
  misc_feature (61)..(62): /note="This region represents a CpG dinucleotide"
  misc_feature (61)..(61): /note="Nucleotide may be methylated to form 5-methylcytosine"
acaggaccctgtgccagcatggtgccacatgccagctggtcagtacagccaaggagcatacgtatgctgggccctgtatcagcagtctcagctggtcactgacaaggcaaccatgctgaaga

SEQ ID NO: 13231 - DNA, 122 bp, Homo sapiens
  misc_feature (61)..(62): /note="This region represents a CpG dinucleotide"
  misc_feature (61)..(61): /note="Nucleotide may be methylated to form 5-methylcytosine"
ggattatgactttactttgttaagacatctaagtagacaggcccagcgagtcattggaaacgttcatctgtaactcataagagaagcaaaataattggtaatcctatgcaaaaaagcgaaat

SEQ ID NO: 13232 - DNA, 122 bp, Homo sapiens
  misc_feature (61)..(62): /note="This region represents a CpG dinucleotide"
  misc_feature (61)..(61): /note="Nucleotide may be methylated to form 5-methylcytosine"
agtcccccaaaagcccatccctagagaatttgtcactatttgacctgacagctcagggctcgtctgtttcatttgactcagaggttgttccatgcaaccagccctacccatagggcatttat

SEQ ID NO: 13233 - DNA, 122 bp, Homo sapiens
  misc_feature (61)..(62): /note="This region represents a CpG dinucleotide"
  misc_feature (61)..(61): /note="Nucleotide may be methylated to form 5-methylcytosine"
ccatccttctgttgtcatttcaagctagaggctcaagcctggaggagtgaggatcaagatcgagaactcaaagctgtttagaggaagaagccaagttcaaggaggagtgaggaacggtaggt

SEQ ID NO: 13234 - DNA, 122 bp, Homo sapiens
  misc_feature (61)..(62): /note="This region represents a CpG dinucleotide"
  misc_feature (61)..(61): /note="Nucleotide may be methylated to form 5-methylcytosine"
tgtgtctgagtctcttcactgagaggtgagctttgctacccccagaatggcctccatctgcgttgctttgcattcgggcatgtggtgggagggggcagctcctcctattcacccacagcaag

SEQ ID NO: 13235 - DNA, 122 bp, Homo sapiens
  misc_feature (61)..(62): /note="This region represents a CpG dinucleotide"
  misc_feature (61)..(61): /note="Nucleotide may be methylated to form 5-methylcytosine"
tgtggtttgaacatcctgatcacttctgagacaatgccattagtgaatacattctaagcacgtcatctgaatattcacagacatctttttaaaagggctggatctggaagttaggccatgaa

SEQ ID NO: 13236 - DNA, 122 bp, Homo sapiens
  misc_feature (61)..(62): /note="This region represents a CpG dinucleotide"
  misc_feature (61)..(61): /note="Nucleotide may be methylated to form 5-methylcytosine"
tattatggaaggaagaggtctctctctctctccctctctttctctctctctctgtgtgaacgtgcaccaaagaaaggcatgtgaccatgttgcaagacgacaaatgtgtgcaagccagaaag

SEQ ID NO: 13237 - DNA, 122 bp, Homo sapiens
  misc_feature (61)..(62): /note="This region represents a CpG dinucleotide"
  misc_feature (61)..(61): /note="Nucleotide may be methylated to form 5-methylcytosine"
aagactatctgagttcatctcagaggttgcctgccacaatggcgagttctatcaggaggacgtccctgagctacagctgacgtttgtgtcaccaaaaaccatggggcgtctacacatctgca

SEQ ID NO: 13238 - DNA, 122 bp, Homo sapiens
  misc_feature (61)..(62): /note="This region represents a CpG dinucleotide"
  misc_feature (61)..(61): /note="Nucleotide may be methylated to form 5-methylcytosine"
tgtcagcttagaatagacattttcagacatttaagctttaaaaaatctgttcccatataccgcaggaagctactgtaggacatgctccaccaaaatgaggatgcaaaccaaaaaagtgcaag

SEQ ID NO: 13239 - DNA, 122 bp, Homo sapiens
  misc_feature (61)..(62): /note="This region represents a CpG dinucleotide"
  misc_feature (61)..(61): /note="Nucleotide may be methylated to form 5-methylcytosine"
tgcaagaatcaacccagcctcatgaaagctgcattaatacattcatgagggtagtagtcccgtaacccaaacgccttttaatggccccatcagctctcaatagtgtcacattggcaaatttc

SEQ ID NO: 13240 - DNA, 122 bp, Homo sapiens
  misc_feature (61)..(62): /note="This region represents a CpG dinucleotide"
  misc_feature (61)..(61): /note="Nucleotide may be methylated to form 5-methylcytosine"
ctgtgcatgatcaaggtcatgatcaggcaaagttcagtcacctcagggcacacccctttccgaaacgggcaggaggtcgaagtgccaagtgaccagggaagaggaaggggtggacctgggca

SEQ ID NO: 13241 - DNA, 122 bp, Homo sapiens
  misc_feature (61)..(62): /note="This region represents a CpG dinucleotide"
  misc_feature (61)..(61): /note="Nucleotide may be methylated to form 5-methylcytosine"
tcgcccagctctaggtgctttcaaagcaaaccagactaaactcttggacaaaggccattgcgcagatcaggaagtctaactgaccattccagaatctctgcttccattccccactttaaatc

SEQ ID NO: 13242 - DNA, 122 bp, Homo sapiens
  misc_feature (61)..(62): /note="This region represents a CpG dinucleotide"
  misc_feature (61)..(61): /note="Nucleotide may be methylated to form 5-methylcytosine"
cctagaccctgcctgaggtacagctcctgggtcacctcatgcaaccaaaggtgggcgtctcggggaggttcccaccagcgcagggaggtggcttctgagcaacctcactaaagtctccacca

SEQ ID NO: 13243 - DNA, 122 bp, Homo sapiens
  misc_feature (61)..(62): /note="This region represents a CpG dinucleotide"
  misc_feature (61)..(61): /note="Nucleotide may be methylated to form 5-methylcytosine"
actacagtgtggtggtgaagagcgtggtttcagtcccaggcagacccagtcccagttcctcggctgccactcactggccacagaatgcaagcaagtgacttaatctctccggcctccagttt

SEQ ID NO: 13244 - DNA, 122 bp, Homo sapiens
  misc_feature (61)..(62): /note="This region represents a CpG dinucleotide"
  misc_feature (61)..(61): /note="Nucleotide may be methylated to form 5-methylcytosine"
gccatcacccctgtctagccatggaactctttcatcttgcaaaactggaaatgccttactcgtgaaccagtacctccccattcccagccattccagtttcttgtagcgcatcttctctttga

SEQ ID NO: 13245 - DNA, 122 bp, Homo sapiens
  misc_feature (61)..(62): /note="This region represents a CpG dinucleotide"
  misc_feature (61)..(61): /note="Nucleotide may be methylated to form 5-methylcytosine"
ttcaggcacttatttcttgcttagactaatgaggtagtctcctaactcatcagcctgtctcggtctcttctcccttcagtaggtctttctctaccctgtcactgattgatcattctgaaaca

SEQ ID NO: 13246 - DNA, 122 bp, Homo sapiens
  misc_feature (61)..(62): /note="This region represents a CpG dinucleotide"
  misc_feature (61)..(61): /note="Nucleotide may be methylated to form 5-methylcytosine"
tcaccatttttaaatgctccattcagctgaggcttcttgaacattttatgacaccctttgcgtatagactgagaggtaacaggaaattcatgttttgtttgggaaaggcctggcctatgatg

SEQ ID NO: 13247 - DNA, 122 bp, Homo sapiens
  misc_feature (61)..(62): /note="This region represents a CpG dinucleotide"
  misc_feature (61)..(61): /note="Nucleotide may be methylated to form 5-methylcytosine"
agcaactgcaaggaaaggctttgtaaagaacaaatctggcccaagttgcttaatgtgaaacggatgtaatccttgactgtacaaagcccttttatgaagagttaaggagttctaggtcattg

SEQ ID NO: 13248 - DNA, 122 bp, Homo sapiens
  misc_feature (61)..(62): /note="This region represents a CpG dinucleotide"
  misc_feature (61)..(61): /note="Nucleotide may be methylated to form 5-methylcytosine"
tgcctcgccgctgaggtcaggccctattcagagctggcagagtgtttatcatcatcctcacgtgtgaagggaggagggtggagaaggaagccggcaggaggaggaggaggaggagcagcagc

SEQ ID NO: 13249 - DNA, 122 bp, Homo sapiens
  misc_feature (61)..(62): /note="This region represents a CpG dinucleotide"
  misc_feature (61)..(61): /note="Nucleotide may be methylated to form 5-methylcytosine"
gcaaccctaaggcaaatttgcatcctccctatagtatcacaggcaatgcacttttgaaagcgccacctcctggctggaggtcaaccaacacaaaacaaaaatataaccaaggacccaaggac

SEQ ID NO: 13250 - DNA, 122 bp, Homo sapiens
  misc_feature (61)..(62): /note="This region represents a CpG dinucleotide"
  misc_feature (61)..(61): /note="Nucleotide may be methylated to form 5-methylcytosine"
ctttatagaggagagtatatttcacattgcctagaatagtggttagcaagcttcagcctgcggcccgactgcctgcttctgtcaatgtgactttatgggcacatagccacacccacctgctt

SEQ ID NO: 13251 - DNA, 122 bp, Homo sapiens
  misc_feature (61)..(62): /note="This region represents a CpG dinucleotide"
  misc_feature (61)..(61): /note="Nucleotide may be methylated to form 5-methylcytosine"
gcccccttgcccatcacaaaatgccttcctcttcctgggttcctgcaccctgcctgcccacgcctattgagaaagcctttccgccagggccaggactagagtgaaacatgtgaggcattcac

SEQ ID NO: 13252 - DNA, 122 bp, Homo sapiens
  misc_feature (61)..(62): /note="This region represents a CpG dinucleotide"
  misc_feature (61)..(61): /note="Nucleotide may be methylated to form 5-methylcytosine"
ataaaatacttgaatgctttccccaagcttctatttttacttgtcttacttcaaagactacgaaagacagtgttataccttttgaccaagaatataatttgaaagtcctgattccagaattc

SEQ ID NO: 13253 - DNA, 122 bp, Homo sapiens
  misc_feature (61)..(62): /note="This region represents a CpG dinucleotide"
  misc_feature (61)..(61): /note="Nucleotide may be methylated to form 5-methylcytosine"
tgaccaactgctccaggttgcccagaactgggagggattcccaggtgctaaaaccaggaacgtctcaggcaaaccagcatgcgttggtaaacctcagaaaggaggctaaagcaataaacagg

SEQ ID NO: 13254 - DNA, 122 bp, Homo sapiens
  misc_feature (61)..(62): /note="This region represents a CpG dinucleotide"
  misc_feature (61)..(61): /note="Nucleotide may be methylated to form 5-methylcytosine"
agtttctatcctattccatttctgatttgtgatctcagaaatctgtcttcacactaatcccgccattatgactctcttggcgcccccgcctgtcatgtgaacagaagacaggccaagaacat

SEQ ID NO: 13255 - DNA, 122 bp, Homo sapiens
  misc_feature (61)..(62): /note="This region represents a CpG dinucleotide"
  misc_feature (61)..(61): /note="Nucleotide may be methylated to form 5-methylcytosine"
tggagtttgagctgcccattaggcatcaatgatgagtaagcagttgggaaaagttaagggcggaggttggagttgaaaataaaactttgggcatcatcaccatataactggtatttaaagcc

SEQ ID NO: 13256 - DNA, 122 bp, Homo sapiens
  misc_feature (61)..(62): /note="This region represents a CpG dinucleotide"
  misc_feature (61)..(61): /note="Nucleotide may be methylated to form 5-methylcytosine"
gagtaatcaaatgccatcttctgagccagacactgtcactagcacctgccacggctgccacgtgtccaggtgctctgtaatgagtgctgtgggctgaacccaaaatctcatgcagaaacacc

SEQ ID NO: 13257 - DNA, 122 bp, Homo sapiens
  misc_feature (61)..(62): /note="This region represents a CpG dinucleotide"
  misc_feature (61)..(61): /note="Nucleotide may be methylated to form 5-methylcytosine"
cctgagagaggggttcaggtacatgtgactgattgatgaaatactgtcaggaggcagtaacgtggaaattaggataaagtagggtaaagagttaaggaataatataatatgactcagcttgg

SEQ ID NO: 13258 - DNA, 122 bp, Homo sapiens
  misc_feature (61)..(62): /note="This region represents a CpG dinucleotide"
  misc_feature (61)..(61): /note="Nucleotide may be methylated to form 5-methylcytosine"
atatggtacttaatccctagaagcaggtatacactgggcgggatagcccagtggttaagacggtccctgctgtgcagcttactgttgtgtgtaacctcagacaagttacctcatccctctgg

SEQ ID NO: 13259 - DNA, 122 bp, Homo sapiens
  misc_feature (61)..(62): /note="This region represents a CpG dinucleotide"
  misc_feature (61)..(61): /note="Nucleotide may be methylated to form 5-methylcytosine"
ccttcctttgggcttaagccagcctggtttggtttccgagtctttcaaccaaagggatctcggtagaagcaggcagttgtgcaactggggcccaggcacgtgactcaacttgcccagggtca

SEQ ID NO: 13260 - DNA, 122 bp, Homo sapiens
  misc_feature (61)..(62): /note="This region represents a CpG dinucleotide"
  misc_feature (61)..(61): /note="Nucleotide may be methylated to form 5-methylcytosine"
tctgcttttgtgcagttacggataatgaggattctaaacactgaggtggctttgtgatctcgacatctgtccctgagggactggcctgagactgctgactcatttcacacagctgtcacatg

SEQ ID NO: 13261 - DNA, 122 bp, Homo sapiens
  misc_feature (61)..(62): /note="This region represents a CpG dinucleotide"
  misc_feature (61)..(61): /note="Nucleotide may be methylated to form 5-methylcytosine"
ggcaactgactgactccacccagcctcatgactcctgaccctgctcagaggctgactcagcgcagaaggactgctttccacaccctatgatttgatccccaaccaatcagcagcacctctgc

SEQ ID NO: 13262 - DNA, 122 bp, Homo sapiens
  misc_feature (61)..(62): /note="This region represents a CpG dinucleotide"
  misc_feature (61)..(61): /note="Nucleotide may be methylated to form 5-methylcytosine"
agtacctacttcataggcttgttgaaaagctaaaggagctaattcacacaatgctttgtacgtagtgaggttcagtaattttagttgtcattatcgttatctgaaggtcctcaagtatcttc

SEQ ID NO: 13263 - DNA, 122 bp, Homo sapiens
  misc_feature (61)..(62): /note="This region represents a CpG dinucleotide"
  misc_feature (61)..(61): /note="Nucleotide may be methylated to form 5-methylcytosine"
ttctggtgatgatgtgagatgatacagggcctacgtaaggagatgaagtcaggtgcatgacgtaggcctgtgacatagcgttaggctactgttcaccttgaacccaggcactgccacaccat

SEQ ID NO: 13264 - DNA, 122 bp, Homo sapiens
  misc_feature (61)..(62): /note="This region represents a CpG dinucleotide"
  misc_feature (61)..(61): /note="Nucleotide may be methylated to form 5-methylcytosine"
tgacagcagcaggtgagcccagtgactatggattgctgtgagctgttgctacggttgtctcgcctgggatgagcagccgaggtgggagggactgagtaggcccagagaatgcagtgactggc

SEQ ID NO: 13265 - DNA, 122 bp, Homo sapiens
  misc_feature (61)..(62): /note="This region represents a CpG dinucleotide"
  misc_feature (61)..(61): /note="Nucleotide may be methylated to form 5-methylcytosine"
gcttaaattcctacaaaggcttgctattggctgtccaatgaaatccagtccaatgaaatgcgatactgctttcaaggcagtgtgtgacctagcccaggtgactcttacaggaataattctta

SEQ ID NO: 13266 - DNA, 122 bp, Homo sapiens
  misc_feature (61)..(62): /note="This region represents a CpG dinucleotide"
  misc_feature (61)..(61): /note="Nucleotide may be methylated to form 5-methylcytosine"
ctccccacgacagataatgagcagcaagtgcttctggcgacttagggtgatgtgaaatcacgctgggaatcctgctcctcctcaggtcctggcagtttcagggcccctccctaggccttact

SEQ ID NO: 13267 - DNA, 122 bp, Homo sapiens
  misc_feature (61)..(62): /note="This region represents a CpG dinucleotide"
  misc_feature (61)..(61): /note="Nucleotide may be methylated to form 5-methylcytosine"
tgtggctaagcactgtagccactccctgggctgcattccatgagggtcagtgcccttgaccgagtcatgtctccagtgctctgtccagaggaggagcttcacaacactgcctgggagctcaa

SEQ ID NO: 13268 - DNA, 122 bp, Homo sapiens
  misc_feature (61)..(62): /note="This region represents a CpG dinucleotide"
  misc_feature (61)..(61): /note="Nucleotide may be methylated to form 5-methylcytosine"
ctgttgtgtttttgcagcatggtttgcttgcatcagccacaaactggatttccaacctgccgaacaacagccttgccttcattctggcagatgctggttatgatgtgtggctgggcaacagc

SEQ ID NO: 13269 - DNA, 122 bp, Homo sapiens
  misc_feature (61)..(62): /note="This region represents a CpG dinucleotide"
  misc_feature (61)..(61): /note="Nucleotide may be methylated to form 5-methylcytosine"
acagtcaggttcctatgattcaaaatcaaatccttgcccaacctctacactgcattcactcgtctaaaagccttgaagttgcattacagaaaatctcatcggattatctactattagttttg

SEQ ID NO: 13270 - DNA, 122 bp, Homo sapiens
  misc_feature (61)..(62): /note="This region represents a CpG dinucleotide"
  misc_feature (61)..(61): /note="Nucleotide may be methylated to form 5-methylcytosine"
cttattctatttagccaccaggctgggacaccctgggcaggactcaaagctcttccttgacgcagctcctggcactgggaaagggctccataaatgtttgtggcacacacacgcgagccagg

SEQ ID NO: 13271 - DNA, 122 bp, Homo sapiens
  misc_feature (61)..(62): /note="This region represents a CpG dinucleotide"
  misc_feature (61)..(61): /note="Nucleotide may be methylated to form 5-methylcytosine"
acatgcttgtcaggtgagtgtgcttttccctctcatgagttcgctgaattaaagggaaagcgtgttgtgtgacatggagtcactgagtcattaacctagtcttatgggaatttggcttacac

SEQ ID NO: 13272 - DNA, 122 bp, Homo sapiens
  misc_feature (61)..(62): /note="This region represents a CpG dinucleotide"
  misc_feature (61)..(61): /note="Nucleotide may be methylated to form 5-methylcytosine"
tatgggcttctaccatttcccccattcctgtctccatctcagagatcctctttgtgctgtcgatggaaaagattgttaacatctactggaatgcttgggaaactctgtaagttggtgagacc

SEQ ID NO: 13273 - DNA, 122 bp, Homo sapiens
  misc_feature (61)..(62): /note="This region represents a CpG dinucleotide"
  misc_feature (61)..(61): /note="Nucleotide may be methylated to form 5-methylcytosine"
actcccggaggttccttttgcaataaccactttagtagctccctagagatgtctgtgtcacgtacccaagagctgaagtcagacttcagaaaatgctccttgacgctctactcttctgagta

SEQ ID NO: 13274 - DNA, 122 bp, Homo sapiens
  misc_feature (61)..(62): /note="This region represents a CpG dinucleotide"
  misc_feature (61)..(61): /note="Nucleotide may be methylated to form 5-methylcytosine"
tgtagggtgtctggaaggcaggtgcggcctgccacttctaatgcaagctgagaacaaacacggcatactgagcccaaatcggccttctgctgctagagacagaggtagaatttatgttttgc

SEQ ID NO: 13275 - DNA, 122 bp, Homo sapiens
  misc_feature (61)..(62): /note="This region represents a CpG dinucleotide"
  misc_feature (61)..(61): /note="Nucleotide may be methylated to form 5-methylcytosine"
tcctgctcggttctttggccgccagctgtccctgttaagtctgattgggatccagctgtacgacatgtgccaggcattggcgtggtgctttcacatttattagattgtttcagtctcagaac

SEQ ID NO: 13276 - DNA, 122 bp, Homo sapiens
  misc_feature (61)..(62): /note="This region represents a CpG dinucleotide"
  misc_feature (61)..(61): /note="Nucleotide may be methylated to form 5-methylcytosine"
agcaaagactgcagtcaggagggctgagtccaaatcctgggtcaaagccacatgtcaactcgtatgacctgatatagtgagttaacctacctgagcctcagtttcctcatctgtaagggagg

SEQ ID NO: 13277 - DNA, 122 bp, Homo sapiens
  misc_feature (61)..(62): /note="This region represents a CpG dinucleotide"
  misc_feature (61)..(61): /note="Nucleotide may be methylated to form 5-methylcytosine"
tgccatttctgcagcagcacagggattgagtaaacttcctgttcttaggcatgtgccatccgctataaccaccaaatgttctagccacagcacctggttaaatgtttctcctcaagtctctg

SEQ ID NO: 13278 - DNA, 122 bp, Homo sapiens
  misc_feature (61)..(62): /note="This region represents a CpG dinucleotide"
  misc_feature (61)..(61): /note="Nucleotide may be methylated to form 5-methylcytosine"
agagatgccattaggtgaaaatattcatgttaagctgatttttcctctttgagctccagacgagggaagcaattaatgaaccagcctaagcagagttgtctagcactgtgtgtgtctttttg

SEQ ID NO: 13279 - DNA, 122 bp, Homo sapiens
  misc_feature (61)..(62): /note="This region represents a CpG dinucleotide"
  misc_feature (61)..(61): /note="Nucleotide may be methylated to form 5-methylcytosine"
ttcttggttcagggaaccacccactgagggggctggctgggagatgcctctcgacactgacgctgtcaaccctgtgtggaattgagaattccactggcttttgttcctggttcctgggaggt

SEQ ID NO: 13280 - DNA, 122 bp, Homo sapiens
  misc_feature (61)..(62): /note="This region represents a CpG dinucleotide"
  misc_feature (61)..(61): /note="Nucleotide may be methylated to form 5-methylcytosine"
tgtcttggtctcacgccttccccagctcttcctgatgagctgccagtccacacctgcaagcgtccccaggccccacacagcaggtctgaccagcactggtccaggcccaggcccagggagtg

SEQ ID NO: 13281 - DNA, 122 bp, Homo sapiens
  misc_feature (61)..(62): /note="This region represents a CpG dinucleotide"
  misc_feature (61)..(61): /note="Nucleotide may be methylated to form 5-methylcytosine"
ctaggattacaggcgtgagccacagtgcccagcccatattttctgtcatttttttcaaaacgtcaagcatcaagtttgaaaggttcagtggatcatgaagctatcccagagcgaacccccca

SEQ ID NO: 13282 - DNA, 122 bp, Homo sapiens
  misc_feature (61)..(62): /note="This region represents a CpG dinucleotide"
  misc_feature (61)..(61): /note="Nucleotide may be methylated to form 5-methylcytosine"
ttccaagcacttttcctataaactttctaccaacaatgagactcaacagttgggaactggcgggggtggggaggacagaaacctccacagctaatcattcctttgggttaattaggacgtcc

SEQ ID NO: 13283 - DNA, 122 bp, Homo sapiens
  misc_feature (61)..(62): /note="This region represents a CpG dinucleotide"
  misc_feature (61)..(61): /note="Nucleotide may be methylated to form 5-methylcytosine"
tgtatcccaagagttaaggaaagctgaccttttgagggctatttcagccaaatcagggtgcggtctactgaatcatctccaccttacagcagggcacgtctatgtgaaaacaaatttcacac

SEQ ID NO: 13284 - DNA, 122 bp, Homo sapiens
  misc_feature (61)..(62): /note="This region represents a CpG dinucleotide"
  misc_feature (61)..(61): /note="Nucleotide may be methylated to form 5-methylcytosine"
cctgacctcaagtgatccgcctgccgaggcctcccaaagtgctgggattacaggcaaccacgccaagcctatagcacagtttctaatacatgctgctatatgggtgtgtcatagtttattag

SEQ ID NO: 13285 - DNA, 122 bp, Homo sapiens
  misc_feature (61)..(62): /note="This region represents a CpG dinucleotide"
  misc_feature (61)..(61): /note="Nucleotide may be methylated to form 5-methylcytosine"
gcaggtcggctgttgagcccctgaacaatgaggagctcacctttagagggtccagtgctccgcctgggtcacagaggctcagaattacaaaatcctctggtagctttcatggcactctcact

SEQ ID NO: 13286 - DNA, 122 bp, Homo sapiens
  misc_feature (61)..(62): /note="This region represents a CpG dinucleotide"
  misc_feature (61)..(61): /note="Nucleotide may be methylated to form 5-methylcytosine"
gcccagaggagagaaggcggcggcgcggctgaggtccccgcagctgggccaagactcgggcgctgggaccgtccccgtcgaacagcgtcagcatgtccccttcccgcacattcaatctgcag

SEQ ID NO: 13287 - DNA, 122 bp, Homo sapiens
  misc_feature (61)..(62): /note="This region represents a CpG dinucleotide"
  misc_feature (61)..(61): /note="Nucleotide may be methylated to form 5-methylcytosine"
cacaccattagagatgaatgccctcagcagaaggcaaaagtaggttacatcccttggttacgtgccagcccaaagatgccgacacagtggaattgagccccacaatggtcatttatctaatg

SEQ ID NO: 13288 - DNA, 122 bp, Homo sapiens
  misc_feature (61)..(62): /note="This region represents a CpG dinucleotide"
  misc_feature (61)..(61): /note="Nucleotide may be methylated to form 5-methylcytosine"
actcacagcaaatcaagtccacagcaagcaatgctgtgtcattctgacagccctgcatcacgcagccacccagcagggcctggagccttcccaggcctcaggctctgaccttgaccttctgc

SEQ ID NO: 13289 - DNA, 122 bp, Homo sapiens
  misc_feature (61)..(62): /note="This region represents a CpG dinucleotide"
  misc_feature (61)..(61): /note="Nucleotide may be methylated to form 5-methylcytosine"
gcacagcatgatagcaagccaggctgatgcccagtgaagccaggctgatgccctggcatgcgtgtgactctgggaagtgcccagtgatctctccccaggtcacacccaccccaggtgaagca

SEQ ID NO: 13290 - DNA, 122 bp, Homo sapiens
  misc_feature (61)..(62): /note="This region represents a CpG dinucleotide"
  misc_feature (61)..(61): /note="Nucleotide may be methylated to form 5-methylcytosine"
gacggggtttcgccatgttgctcagtctggtcttgaattcctgggcttaagggatttgctcgctttggcctcctgaagtgttaggattacaggcgtgagccaccgtgcctggcctgaaaatc

SEQ ID NO: 13291 - DNA, 122 bp, Homo sapiens
  misc_feature (61)..(62): /note="This region represents a CpG dinucleotide"
  misc_feature (61)..(61): /note="Nucleotide may be methylated to form 5-methylcytosine"
gtggagcaccctttatgacacaaacaagagctcaaggatggtggctggggttcagtctgccgctgcaaataccaaaagctgtcctcattgagtcatccctcccagagcaggaagagcagagg

SEQ ID NO: 13292 - DNA, 122 bp, Homo sapiens
  misc_feature (61)..(62): /note="This region represents a CpG dinucleotide"
  misc_feature (61)..(61): /note="Nucleotide may be methylated to form 5-methylcytosine"
tttttctcttaaacagtggctggctaacaatcaaaaataggttttggtaatgttgggtaacgttgctcaaatacggctatattatgcagagcacatggcaatcgttgaagagtaaaacacag

SEQ ID NO: 13293 - DNA, 122 bp, Homo sapiens
  misc_feature (61)..(62): /note="This region represents a CpG dinucleotide"
  misc_feature (61)..(61): /note="Nucleotide may be methylated to form 5-methylcytosine"
tttacctgtgtttccactcggcctattttttccttctctcctatagggagcatgattgagcggatattagtgtcgtgcaacaaccagcaggatctgcaggaatgggtggagcacctacagaa

SEQ ID NO: 13294 - DNA, 122 bp, Homo sapiens
  misc_feature (61)..(62): /note="This region represents a CpG dinucleotide"
  misc_feature (61)..(61): /note="Nucleotide may be methylated to form 5-methylcytosine"
cagtgctaagttgtgccaaaaactagcatgtttcactgaatcagagtggtaagcacaccccgcctgtccgggactggggtgccttgttgtttacgaggaggtgcggcagcccccgcaactgg

SEQ ID NO: 13295 - DNA, 122 bp, Homo sapiens
  misc_feature (61)..(62): /note="This region represents a CpG dinucleotide"
  misc_feature (61)..(61): /note="Nucleotide may be methylated to form 5-methylcytosine"
ctcaaatgatctgcctgccttggcctcccaaagtgctgggattacaggcgtgagccaccacgcccggtgctgatggcatttggaaccaccctgtagttacatacacaagtgtttctgatccc

SEQ ID NO: 13296 - DNA, 122 bp, Homo sapiens
  misc_feature (61)..(62): /note="This region represents a CpG dinucleotide"
  misc_feature (61)..(61): /note="Nucleotide may be methylated to form 5-methylcytosine"
gggcccatggcagtaatgtgcgtctgtggatccctttgctatgaggcttgacttcttgatcgggttcacaaggctggtgggcagcctgagatctttgcttatttcctacgtcttctgaaagg

SEQ ID NO: 13297 - DNA, 122 bp, Homo sapiens
  misc_feature (61)..(62): /note="This region represents a CpG dinucleotide"
  misc_feature (61)..(61): /note="Nucleotide may be methylated to form 5-methylcytosine"
cactcacttcctaaggttactgtgaagttcaaggagatcgtgcatgaaaacacgctggcacgcttcgtggctgggaagtgctcagtaatcaacagctgttcacactcccaggcccggcatct

SEQ ID NO: 13298 - DNA, 122 bp, Homo sapiens
  misc_feature (61)..(62): /note="This region represents a CpG dinucleotide"
  misc_feature (61)..(61): /note="Nucleotide may be methylated to form 5-methylcytosine"
tggcaactcagaactgagtgagcaactgtatgatgtgggctatcgggatatagtgaacatcgacatcagtgaggttgtcatcaagcaaatgaaggaatgtaatgccacccgacggccccaga

SEQ ID NO: 13299 - DNA, 122 bp, Homo sapiens
  misc_feature (61)..(62): /note="This region represents a CpG dinucleotide"
  misc_feature (61)..(61): /note="Nucleotide may be methylated to form 5-methylcytosine"
ctcttgagcccgtggcttcctttgcaaaggcccagggtaagaaaggcagtgcagggaacacgtggagtcagttgtctaacaataacaaagatctgctcttgggaggtgtggctccatcccca

SEQ ID NO: 13300 - DNA, 122 bp, Homo sapiens
  misc_feature (61)..(62): /note="This region represents a CpG dinucleotide"
  misc_feature (61)..(61): /note="Nucleotide may be methylated to form 5-methylcytosine"
tcactctatcacccagggtggagtgcagtatactcacagtatactcatagccaatagcaccgtaactcacccctcattgaagcttgttcaacacagtttttttctctgtaaggcatgttata

SEQ ID NO: 13301 - DNA, 122 bp, Homo sapiens
  misc_feature (61)..(62): /note="This region represents a CpG dinucleotide"
  misc_feature (61)..(61): /note="Nucleotide may be methylated to form 5-methylcytosine"
gtgattgaggggcaggtggctggagagatgggcagggcctcctaggcatggggtgactgacgcaccagtggtctgcaaaaacggagcatcacaccagtgcgcatgagctctcctgccccttg

SEQ ID NO: 13302 - DNA, 122 bp, Homo sapiens
  misc_feature (61)..(62): /note="This region represents a CpG dinucleotide"
  misc_feature (61)..(61): /note="Nucleotide may be methylated to form 5-methylcytosine"
ttcaaagggaaatcaggctgcatctgctgagggaacgaggagacaagggagcctcttgcacgcttgtaatgtctgagccagatcttagattcacctgcagcaggcccagcccttttccccag

SEQ ID NO: 13303 - DNA, 122 bp, Homo sapiens
  misc_feature (61)..(62): /note="This region represents a CpG dinucleotide"
  misc_feature (61)..(61): /note="Nucleotide may be methylated to form 5-methylcytosine"
ttcaatttgggatatgtgtactgtaagatgtttgtaaggcatttatattgaaaggtcaaacgaagatttagatataacaggcctgaatctcagaagaaaggcatgtgcaagatcaagttgag

SEQ ID NO: 13304 - DNA, 122 bp, Homo sapiens
  misc_feature (61)..(62): /note="This region represents a CpG dinucleotide"
  misc_feature (61)..(61): /note="Nucleotide may be methylated to form 5-methylcytosine"
gtgagatgtagtagagtggacagtctggggaaatatgtgttcagtgcagccagtagaccacgctgacagattggtgtggcaggttaaggaaaagaacaatatgaaactcagccttctggctt

SEQ ID NO: 13305 - DNA, 122 bp, Homo sapiens
  misc_feature (61)..(62): /note="This region represents a CpG dinucleotide"
  misc_feature (61)..(61): /note="Nucleotide may be methylated to form 5-methylcytosine"
ttcacaggttactgccctgttcccactcccaactaaattgtaagcttctaagggcagggacgtagtccacctctgccatgtggttggtttttttagtgtctgacacagcactttgctcaaca

SEQ ID NO: 13306 - DNA, 122 bp, Homo sapiens
  misc_feature (61)..(62): /note="This region represents a CpG dinucleotide"
  misc_feature (61)..(61): /note="Nucleotide may be methylated to form 5-methylcytosine"
tgattcttgctaagcttgcaatgttcttgcaatgatcaatactggtagccactccattaccgtacccacggtttagaaggtagtttgtatttttccttctttttcttttaccacaaacttta

SEQ ID NO: 13307 - DNA, 122 bp, Homo sapiens
  misc_feature (61)..(62): /note="This region represents a CpG dinucleotide"
  misc_feature (61)..(61): /note="Nucleotide may be methylated to form 5-methylcytosine"
ggctggatatgagcttgcttctgctttgtcactgtaacagtattccctgtccatgggccacgccatcctttactcatacggcttccagtaaggcttacttgtttgtaagaataatcagttta

SEQ ID NO: 13308 - DNA, 122 bp, Homo sapiens
  misc_feature (61)..(62): /note="This region represents a CpG dinucleotide"
  misc_feature (61)..(61): /note="Nucleotide may be methylated to form 5-methylcytosine"
cctgtgtatatttaagcgagagtttgatgaaagcaattcccagacttcagaaacatcctccggaaacagcagccaagaagggccaagtaatgtaccaggttagtgattcagaatggaatttc

SEQ ID NO: 13309 - DNA, 122 bp, Homo sapiens
  misc_feature (61)..(62): /note="This region represents a CpG dinucleotide"
  misc_feature (61)..(61): /note="Nucleotide may be methylated to form 5-methylcytosine"
taggagaccttgtcgagtgattcaggtcagctctctgccttaggcaaggatcatccatgccggggcttttaagatgggatattagcctgtcatatgtatagaaaatattgaatttttttgaa

SEQ ID NO: 13310 - DNA, 122 bp, Homo sapiens
  misc_feature (61)..(62): /note="This region represents a CpG dinucleotide"
  misc_feature (61)..(61): /note="Nucleotide may be methylated to form 5-methylcytosine"
agagggatgagctcatctctggatcccaagagacagccccaccccaaccttctaggagaccggaatcaagttcttgactcatctgaattcatatgcttcaatggaacctgcagtcgagtagc

SEQ ID NO: 13311 - DNA, 122 bp, Homo sapiens
  misc_feature (61)..(62): /note="This region represents a CpG dinucleotide"
  misc_feature (61)..(61): /note="Nucleotide may be methylated to form 5-methylcytosine"
agacaaatttccaagcacttgatactagagttctaccactagctagccagctagaggtctcggtatcctctatgaactgttaatgaagttccggaagttctttccttaaaaaacaaaagttc

SEQ ID NO: 13312 - DNA, 122 bp, Homo sapiens
  misc_feature (61)..(62): /note="This region represents a CpG dinucleotide"
  misc_feature (61)..(61): /note="Nucleotide may be methylated to form 5-methylcytosine"
gtgttgcgtgctggtggcagatctggaatactgcggcctcaagaagtccttgcactaagtcgtgatgctggtctgggtgcaggaaagtcttgggataagtcctgtttcaggcatgtgggcgt

SEQ ID NO: 13313 - DNA, 122 bp, Homo sapiens
  misc_feature (61)..(62): /note="This region represents a CpG dinucleotide"
  misc_feature (61)..(61): /note="Nucleotide may be methylated to form 5-methylcytosine"
tgcaatacagcaatgtcttgaagtccactgacacatcaagagtttgtccttgcagccgggcgtggtagctcacgcctgtaatcctggcactttgggaggctgaggtgggcagatcacctgag

SEQ ID NO: 13314 - DNA, 122 bp, Homo sapiens
  misc_feature (61)..(62): /note="This region represents a CpG dinucleotide"
  misc_feature (61)..(61): /note="Nucleotide may be methylated to form 5-methylcytosine"
catctagttcttttgtctcctggagtatgggcagtgacttgtggaaactctgcttcctttcgtactccctaggatgagctgtggtgtgataaagatgactcgggcagcaggcaaacctggtt

SEQ ID NO: 13315 - DNA, 122 bp, Homo sapiens
  misc_feature (61)..(62): /note="This region represents a CpG dinucleotide"
  misc_feature (61)..(61): /note="Nucleotide may be methylated to form 5-methylcytosine"
ttccgtgtgtgggtgggatggaaagaaagaggagtccaggtcaattagacctggttatctcgctaggacttatatcagaacagaaatcagaatgaattgttatggaaaggggatgttgcatt

SEQ ID NO: 13316 - DNA, 122 bp, Homo sapiens
  misc_feature (61)..(62): /note="This region represents a CpG dinucleotide"
  misc_feature (61)..(61): /note="Nucleotide may be methylated to form 5-methylcytosine"
ctctgtcataaagactgcccacaggggagcctgtgagttggaatggctgggaatcaggagcgttgtagtgattgtgctcagtccttacctaggagttatgtcaggaaaagcctggccttagc

SEQ ID NO: 13317 - DNA, 122 bp, Homo sapiens
  misc_feature (61)..(62): /note="This region represents a CpG dinucleotide"
  misc_feature (61)..(61): /note="Nucleotide may be methylated to form 5-methylcytosine"
acagccagtgaccagaggctgcttgttctacaagaaagagcactgtcctagccttggggacgcaactagcagagtgaccagagcaaaccatccataaaattatgaccaggccaggcgcagtg

SEQ ID NO: 13318 - DNA, 122 bp, Homo sapiens
  misc_feature (61)..(62): /note="This region represents a CpG dinucleotide"
  misc_feature (61)..(61): /note="Nucleotide may be methylated to form 5-methylcytosine"
ccaggtgtgacacacacagctgttagtgctgaaaacagccttagcctgctctctgttcagcggtgatccagtgtgtcaattctaatttattgtagtccaaagtgttggtgttttcctgtgct

SEQ ID NO: 13319 - DNA, 122 bp, Homo sapiens
  misc_feature (61)..(62): /note="This region represents a CpG dinucleotide"
  misc_feature (61)..(61): /note="Nucleotide may be methylated to form 5-methylcytosine"
ccacccagattcaggactgacccaggcctggccaatcaacaaggccttcagggactggtacgtgtcagttaaatgagtcagtcccaggacgctttgtatatatatgtatgtaatatttgtaa

SEQ ID NO: 13320 - DNA, 122 bp, Homo sapiens
  misc_feature (61)..(62): /note="This region represents a CpG dinucleotide"
  misc_feature (61)..(61): /note="Nucleotide may be methylated to form 5-methylcytosine"
agcctggcgtggtggtgcatgcctgtagtcctagctacttaggaggctaagatgagagaccggcttgagccgaggaggcagatttcagtgagtcaagatcatatcactgcactccagcctgg

SEQ ID NO: 13321 - DNA, 122 bp, Homo sapiens
  misc_feature (61)..(62): /note="This region represents a CpG dinucleotide"
  misc_feature (61)..(61): /note="Nucleotide may be methylated to form 5-methylcytosine"
actagaacaattcctggttgtaacagggccacaaagcagcaaggtacctgaaatgttctgcgtcttccttttgagggaaagccatggggggccgggggcaggaaagggaggctgaagggaat

SEQ ID NO: 13322 - DNA, 122 bp, Homo sapiens
  misc_feature (61)..(62): /note="This region represents a CpG dinucleotide"
  misc_feature (61)..(61): /note="Nucleotide may be methylated to form 5-methylcytosine"
ctgactctacatggcatgtgtattttgatttgaactggtatttccccccttcttcactgacgttcagtaagggtagcaaagagacaagtgctgttctgtactcaatcaggtaaaaggggttt

SEQ ID NO: 13323 - DNA, 122 bp, Homo sapiens
  misc_feature (61)..(62): /note="This region represents a CpG dinucleotide"
  misc_feature (61)..(61): /note="Nucleotide may be methylated to form 5-methylcytosine"
ctcacatgaccaagagagggatcatcgctcaacgtctcataaggtcactaatcccattcacgaaggctccaccctcatgacctaataattacctcccaaaggcccttcatccaaatactatc

SEQ ID NO: 13324 - DNA, 122 bp, Homo sapiens
  misc_feature (61)..(62): /note="This region represents a CpG dinucleotide"
  misc_feature (61)..(61): /note="Nucleotide may be methylated to form 5-methylcytosine"
agactgacggttttagtcttgacacctgccggagcattgtgtctgtcatggacagtgacacgactggtaagctgggctttgaagaatttaagtatctgtggaacaacatcaagaaatggcag

SEQ ID NO: 13325 - DNA, 122 bp, Homo sapiens
  misc_feature (61)..(62): /note="This region represents a CpG dinucleotide"
  misc_feature (61)..(61): /note="Nucleotide may be methylated to form 5-methylcytosine"
ggtgatccacctaccttggcctcccaaagtgctgggattataggtgtgagtcactgtacccggccaggatgattctattctaagaagctaggagaacattccagatactcctccagaaacta

SEQ ID NO: 13326 - DNA, 122 bp, Homo sapiens
  misc_feature (61)..(62): /note="This region represents a CpG dinucleotide"
  misc_feature (61)..(61): /note="Nucleotide may be methylated to form 5-methylcytosine"
aaagaaggaaagccaggacagtgcatgtgacattttccctcatcatttggtttctgtcagcgagaaatatgctttagtaatttggaaataaactcactgcagggggtgaataacaggtttga

SEQ ID NO: 13327 - DNA, 122 bp, Homo sapiens
  misc_feature (61)..(62): /note="This region represents a CpG dinucleotide"
  misc_feature (61)..(61): /note="Nucleotide may be methylated to form 5-methylcytosine"
tgctgggcatctggaactgtctctgctctagtgctgcactaattggttgataccttccttcgctaaatcttgttacaacctgcaactaaagacgaggctctccccattcaatcaatgaagcg

SEQ ID NO: 13328 - DNA, 122 bp, Homo sapiens
  misc_feature (61)..(62): /note="This region represents a CpG dinucleotide"
  misc_feature (61)..(61): /note="Nucleotide may be methylated to form 5-methylcytosine"
aagtccaaacaagctttgcaagtccaggtctctcacaagttcatagtaatctcttcctggcgagagccacaaagcaatgggtgataccagaatggtgcttaccattcttaagtggagaaaat

SEQ ID NO: 13329 - DNA, 122 bp, Homo sapiens
  misc_feature (61)..(62): /note="This region represents a CpG dinucleotide"
  misc_feature (61)..(61): /note="Nucleotide may be methylated to form 5-methylcytosine"
cacggctgactaaagctgtcttttattctgctaacacccttcaaatactgttgacaatatcgcctctcaagtgtttcctcccacaaaatctgctgcttatagcacaggcaccaaagtcctgc

SEQ ID NO: 13330 - DNA, 122 bp, Homo sapiens
  misc_feature (61)..(62): /note="This region represents a CpG dinucleotide"
  misc_feature (61)..(61): /note="Nucleotide may be methylated to form 5-methylcytosine"
cgaagtgggacagggcagattcaaagaggactttgcagaagggtttgggaggatctgagacgaagtgcatataagagggcagagtcaaagatgactaagataattgaggaaggacacgcaga

SEQ ID NO: 13331 - DNA, 122 bp, Homo sapiens
  misc_feature (61)..(62): /note="This region represents a CpG dinucleotide"
  misc_feature (61)..(61): /note="Nucleotide may be methylated to form 5-methylcytosine"
ctctgcagggtgaggcccaacatctcgccacattaaccctgcgaactcagccccagtaaacgaggctgggagccattaatgcctaatgatgttgcattgtcttccaataacaaaccatctca

SEQ ID NO: 13332 - DNA, 122 bp, Homo sapiens
  misc_feature (61)..(62): /note="This region represents a CpG dinucleotide"
  misc_feature (61)..(61): /note="Nucleotide may be methylated to form 5-methylcytosine"
ttaggtactaaggatacaatcatgagtaagatttaatctctgcccttgaagagttcatagcgtagtgggagaaaaaagaagttgcaaaaaagaacaacaaaagtgtaatagtaaaatgtacc

SEQ ID NO: 13333 - DNA, 122 bp, Homo sapiens
  misc_feature (61)..(62): /note="This region represents a CpG dinucleotide"
  misc_feature (61)..(61): /note="Nucleotide may be methylated to form 5-methylcytosine"
gtctgttcagattcttgaactttctttcgattgtagcatttctcctttcaggatacagtacgggatcctttctggaatggaggtcttatgagctgctattgaacacggcaggtgagagaatt

SEQ ID NO: 13334 - DNA, 122 bp, Homo sapiens
  misc_feature (61)..(62): /note="This region represents a CpG dinucleotide"
  misc_feature (61)..(61): /note="Nucleotide may be methylated to form 5-methylcytosine"
gaaccaccttcttctcaggcctctgaagggcttgctctcctctttgcagcgatgggcagacggcagcaggaagctgcgtgaaacatgcccggcctctacgcaactctaccacagcttgctga

SEQ ID NO: 13335 - DNA, 122 bp, Homo sapiens
  misc_feature (61)..(62): /note="This region represents a CpG dinucleotide"
  misc_feature (61)..(61): /note="Nucleotide may be methylated to form 5-methylcytosine"
ctcttgtcaccacagagtgctcaccagagtttatcctaagcctaactactgcagattacacgttcatgtggggtttgctaacacattgttctaattcatctgaaatgattgggttttctcaa

SEQ ID NO: 13336 - DNA, 122 bp, Homo sapiens
  misc_feature (61)..(62): /note="This region represents a CpG dinucleotide"
  misc_feature (61)..(61): /note="Nucleotide may be methylated to form 5-methylcytosine"
ctcatcagcagtccactcttggttaaagcactagattagcaacttctgtttccacagtggcgctcaaccaatattctggtagcagtcaggaggtcaaggtttaactcttatctgggaaaaga

SEQ ID NO: 13337 - DNA, 122 bp, Homo sapiens
  misc_feature (61)..(62): /note="This region represents a CpG dinucleotide"
  misc_feature (61)..(61): /note="Nucleotide may be methylated to form 5-methylcytosine"
aactactgctctaggcataatgctttatttattttcttacaaacatatcacatccttttacgtcataccttaattctagaaatttcctatatctggaatgcccttcttcttagtcattttta

SEQ ID NO: 13338 - DNA, 122 bp, Homo sapiens
  misc_feature (61)..(62): /note="This region represents a CpG dinucleotide"
  misc_feature (61)..(61): /note="Nucleotide may be methylated to form 5-methylcytosine"
tcccggaccctaggacagggcacagagtgggtgcttgccacctttttgttgccaaatggacgaaagaaaggggaagcaataatcatgtctgctgagcatgtatttagcaccaaacactcatc

SEQ ID NO: 13339 - DNA, 122 bp, Homo sapiens
  misc_feature (61)..(62): /note="This region represents a CpG dinucleotide"
  misc_feature (61)..(61): /note="Nucleotide may be methylated to form 5-methylcytosine"
tggtgaagtgaaacctactgtgaagcagaagcacttacatggtttccttcgagtctcttacgcaaggctacttttaagacatcctcaaattaaaatatgagtatctaacaatgtggccacag

SEQ ID NO: 13340 - DNA, 122 bp, Homo sapiens
  misc_feature (61)..(62): /note="This region represents a CpG dinucleotide"
  misc_feature (61)..(61): /note="Nucleotide may be methylated to form 5-methylcytosine"
aatgcccacatccagttctctgtccctgaggcacggaggtggttgtgctgggctcagagccgccgtctgactggttggaagccctgctctgattttgtgaatcaccctagttaagtggaagc

SEQ ID NO: 13341 - DNA, 122 bp, Homo sapiens
  misc_feature (61)..(62): /note="This region represents a CpG dinucleotide"
  misc_feature (61)..(61): /note="Nucleotide may be methylated to form 5-methylcytosine"
catttcgacagcatgtgtgcaaacatagctggttcatccttggtgagtcatttacagccacgagtatacactgcaggtgacacaagaaccagtgcacgattggatgaaccacagaggaggca

SEQ ID NO: 13342 - DNA, 122 bp, Homo sapiens
  misc_feature (61)..(62): /note="This region represents a CpG dinucleotide"
  misc_feature (61)..(61): /note="Nucleotide may be methylated to form 5-methylcytosine"
cctgtgatttgatttctcttttgtttccatttatggcagagcctccatcttggcaaggcacgtaatcttatccaagctgtgcaaaacctgtccaaagtgtatgtacaataacataaaaattg

SEQ ID NO: 13343 - DNA, 122 bp, Homo sapiens
  misc_feature (61)..(62): /note="This region represents a CpG dinucleotide"
  misc_feature (61)..(61): /note="Nucleotide may be methylated to form 5-methylcytosine"
tagcaacgtctatgagtaagtcaccctttggccatactctcaaaggctcacaaagatagacgtgcaaggacactcattacaacattgtttaacagaatgtcaatgggacatttcatgttgtc

SEQ ID NO: 13344 - DNA, 122 bp, Homo sapiens
  misc_feature (61)..(62): /note="This region represents a CpG dinucleotide"
  misc_feature (61)..(61): /note="Nucleotide may be methylated to form 5-methylcytosine"
atacaggatactgaaggcagctctaaagcagggctttcaaaggcatgttgtgtggtgacacgggaaatgaggtgtcatctcccagggcacagcagccatgaagatccgtggacattccttta

SEQ ID NO: 13345 - DNA, 122 bp, Homo sapiens
  misc_feature (61)..(62): /note="This region represents a CpG dinucleotide"
  misc_feature (61)..(61): /note="Nucleotide may be methylated to form 5-methylcytosine"
tagcttcttgtacactctcctgctgcctgcccgacactaccgagcggagagagaaaggaacgtggctcatgagttcattgaaatgaaatctctaggccgggtgtggtggctcatgcctgtac

SEQ ID NO: 13346 - DNA, 122 bp, Homo sapiens
  misc_feature (61)..(62): /note="This region represents a CpG dinucleotide"
  misc_feature (61)..(61): /note="Nucleotide may be methylated to form 5-methylcytosine"
tttcacattgcactaatgagtcaacacctgttaagagtggagaaatctgaaccttgttagcgattgtgaagcctcttgggagctgggatgctgagcattgtcatactcaccgtcaaaatgtc

SEQ ID NO: 13347 - DNA, 122 bp, Homo sapiens
  misc_feature (61)..(62): /note="This region represents a CpG dinucleotide"
  misc_feature (61)..(61): /note="Nucleotide may be methylated to form 5-methylcytosine"
accatgaaaaagtcatgggtcctgaaccattgagccaagtcagaggtccagaaagtgacacgtcaaggcctctgctagggtgtttcaggaccagggaagagtggggtaagacagtggaaggt

SEQ ID NO: 13348 - DNA, 122 bp, Homo sapiens
  misc_feature (61)..(62): /note="This region represents a CpG dinucleotide"
  misc_feature (61)..(61): /note="Nucleotide may be methylated to form 5-methylcytosine"
ttctgtggaagaatagaagatagacagctccttgctgtctatcacagtatgttctggtcccgttggcctcaccttccatataatcatttccattctactgggctttagccactctggtgact

SEQ ID NO: 13349 - DNA, 122 bp, Homo sapiens
  misc_feature (61)..(62): /note="This region represents a CpG dinucleotide"
  misc_feature (61)..(61): /note="Nucleotide may be methylated to form 5-methylcytosine"
tcagggaatgcatgtaatggacttaactcagtgcctggcacgcagtgaacgataggccgacgttggccaagccagaaaatccgtctgccctgacgtcaggcagggcctaattatagacaccc

SEQ ID NO: 13350 - DNA, 122 bp, Homo sapiens
  misc_feature (61)..(62): /note="This region represents a CpG dinucleotide"
  misc_feature (61)..(61): /note="Nucleotide may be methylated to form 5-methylcytosine"
aagtaacacctgactcatggagttttcctgctgatgatataatgagatgaggtatgtgaacgaagcacatggtttattaaatgtgtcatggcagtttcactgtcttgggtggtatgggaagg

SEQ ID NO: 13351 - DNA, 122 bp, Homo sapiens
  misc_feature (61)..(62): /note="This region represents a CpG dinucleotide"
  misc_feature (61)..(61): /note="Nucleotide may be methylated to form 5-methylcytosine"
ggatacataactaaccactcccaaacttagtggcttaaagtaacagctatttcttcagctcgtgctcctgtgtgttgacaatttgggctggtctcagctgggtggtgcttatgtggcttttg

SEQ ID NO: 13352 - DNA, 122 bp, Homo sapiens
  misc_feature (61)..(62): /note="This region represents a CpG dinucleotide"
  misc_feature (61)..(61): /note="Nucleotide may be methylated to form 5-methylcytosine"
cggtcacctgcccagtgcccaacggtggcccgggcctttagctcattgccctgacttatgcgctcacattggaagggcaggaccatgtctgtgttgaatcactgaagaaaacatcctagtct

SEQ ID NO: 13353 - DNA, 122 bp, Homo sapiens
  misc_feature (61)..(62): /note="This region represents a CpG dinucleotide"
  misc_feature (61)..(61): /note="Nucleotide may be methylated to form 5-methylcytosine"
gctgatcccaaaatccacaatcatagccctaagcatctaggagttccctatctaaatttccgtaccacactacatggtgactccacttagacattcttctgtcacctacaccttaacatata

SEQ ID NO: 13354 - DNA, 122 bp, Homo sapiens
  misc_feature (61)..(62): /note="This region represents a CpG dinucleotide"
  misc_feature (61)..(61): /note="Nucleotide may be methylated to form 5-methylcytosine"
tgatgcccagttgctgactgtgcagtgaatgttccctgatctcctgtggtgctgacatcccgtgtttcttcatgcagagaatggcatcatttcctggtggtcaacatgaagggcaatgacat

SEQ ID NO: 13355 - DNA, 122 bp, Homo sapiens
  misc_feature (61)..(62): /note="This region represents a CpG dinucleotide"
  misc_feature (61)..(61): /note="Nucleotide may be methylated to form 5-methylcytosine"
cgccccggcctctcaaagtgctgggattacaggcgtgagccaccacgcccagcctgcttacggtcacttgtaaatcagatgactttctgcttggtattttgctgtcttcttcaaagtttgga

SEQ ID NO: 13356 - DNA, 122 bp, Homo sapiens
  misc_feature (61)..(62): /note="This region represents a CpG dinucleotide"
  misc_feature (61)..(61): /note="Nucleotide may be methylated to form 5-methylcytosine"
gaaagaagctaatgaatcagccttcaaagtgagcaaacacatgagccattcaattaatcacgcatgagtcttcaaatccatgtccacatcaggctttgtctctcactagttggggaaacttg

SEQ ID NO: 13357 - DNA, 122 bp, Homo sapiens
  misc_feature (61)..(62): /note="This region represents a CpG dinucleotide"
  misc_feature (61)..(61): /note="Nucleotide may be methylated to form 5-methylcytosine"
ggctctcagtattttaatctgcaaaacagggatgaccggtaaggtgatctctaagaggaccgtacagctcccaaatgctttaatcctgctagatcctcagaatacttgagtatgaaatcttc

SEQ ID NO: 13358 - DNA, 122 bp, Homo sapiens
  misc_feature (61)..(62): /note="This region represents a CpG dinucleotide"
  misc_feature (61)..(61): /note="Nucleotide may be methylated to form 5-methylcytosine"
attcccagctcccagaaaaaaaccacaccagccctggaaaagcacaactctttttactaacgaggcctgggagaaagttctcccctatgtcctcatataccctgaagtatattagggtaaac

SEQ ID NO: 13359 - DNA, 122 bp, Homo sapiens
  misc_feature (61)..(62): /note="This region represents a CpG dinucleotide"
  misc_feature (61)..(61): /note="Nucleotide may be methylated to form 5-methylcytosine"
gctgcctgggtttacaatttataaaatgctttcacaactatgacctcatttgacttccaccgtcaccctgacaggcaggtacggcagacctgactgtcatctcatagacaacgaaactcagg

SEQ ID NO: 13360 - DNA, 122 bp, Homo sapiens
  misc_feature (61)..(62): /note="This region represents a CpG dinucleotide"
  misc_feature (61)..(61): /note="Nucleotide may be methylated to form 5-methylcytosine"
aaggcctctgccctgaactcacattttgaatggcaaaatacaatggaactgtctgcctaacgagctcatctggaactcccatgcctccataaggcggtggttggttggcccctttcacgact

SEQ ID NO: 13361 - DNA, 122 bp, Homo sapiens
  misc_feature (61)..(62): /note="This region represents a CpG dinucleotide"
  misc_feature (61)..(61): /note="Nucleotide may be methylated to form 5-methylcytosine"
taggctactactcccaactatgtgacagacacagcagctaagtgactaaagagcaggtaacgtctatggcactgctactctggacacagggatgattcatatcctggacaggtcagggtagg

SEQ ID NO: 13362 - DNA, 122 bp, Homo sapiens
  misc_feature (61)..(62): /note="This region represents a CpG dinucleotide"
  misc_feature (61)..(61): /note="Nucleotide may be methylated to form 5-methylcytosine"
aatttattaaaatggacagtgaaagaaaacagccaatttagttgtgaactggagaagggacgtgaggcatctgttgtctgcaatcttgtatgttgtggttgaccacaaaggcttggcatcag

SEQ ID NO: 13363 - DNA, 122 bp, Homo sapiens
  misc_feature (61)..(62): /note="This region represents a CpG dinucleotide"
  misc_feature (61)..(61): /note="Nucleotide may be methylated to form 5-methylcytosine"
agaagtggaaaccattcctacattcctataggagctgctatctggaaggcctagtatacacgtggcttttcagctgtgattttgtttgattttagggattattctttttctgaatctgagca

SEQ ID NO: 13364 - DNA, 122 bp, Homo sapiens
  misc_feature (61)..(62): /note="This region represents a CpG dinucleotide"
  misc_feature (61)..(61): /note="Nucleotide may be methylated to form 5-methylcytosine"
catcatccctccctattggtgttttgctatagtcatcatgtttacacaaccccatccttccgtgagtgtgctgggaaaagctatctcagcaacatatacccagcatctcctgttctctccta

SEQ ID NO: 13365 - DNA, 122 bp, Homo sapiens
  misc_feature (61)..(62): /note="This region represents a CpG dinucleotide"
  misc_feature (61)..(61): /note="Nucleotide may be methylated to form 5-methylcytosine"
tgctcatgtctaccttagaattgctgtccacagtagcagacaaaaattagaagcaactcacgtattcatcaataacagccaagtactcagcaacccaagcatttcatcaaccaagtaaaaca

SEQ ID NO: 13366 - DNA, 122 bp, Homo sapiens
  misc_feature (61)..(62): /note="This region represents a CpG dinucleotide"
  misc_feature (61)..(61): /note="Nucleotide may be methylated to form 5-methylcytosine"
agcagcactcattcaagtagcaacagctgaaaccagccttattgtgcccctcagtgactccgttaccagccagttggaggcctctcctcaaagagctgagcctgagctcctctttcaaattc

SEQ ID NO: 13367 - DNA, 122 bp, Homo sapiens
  misc_feature (61)..(62): /note="This region represents a CpG dinucleotide"
  misc_feature (61)..(61): /note="Nucleotide may be methylated to form 5-methylcytosine"
ttcctttatagctcagaggggtactggctaggatcccctagagctcaggaagccactgaacgtactcatttgtgaattcagtctgctagaagccaggcaaggcaaaagcactgtgtgaggtg

SEQ ID NO: 13368 - DNA, 122 bp, Homo sapiens
  misc_feature (61)..(62): /note="This region represents a CpG dinucleotide"
  misc_feature (61)..(61): /note="Nucleotide may be methylated to form 5-methylcytosine"
gaggtagcatgagcttcttaatagggtcactgtctctacaaagggacatcaggagcattccgtgtcatgagtattcgggaatctaaacataggggtgataatcctttttaacaacaccatgt

SEQ ID NO: 13369 - DNA, 122 bp, Homo sapiens
  misc_feature (61)..(62): /note="This region represents a CpG dinucleotide"
  misc_feature (61)..(61): /note="Nucleotide may be methylated to form 5-methylcytosine"
tgacctctgcctgaaactggaatcaagaccaagatgacatagctgtggtcacacaaagcccgttaactacatcagttgtctttgtttattcaataactctgagctacacttttttttacaca

SEQ ID NO: 13370 - DNA, 122 bp, Homo sapiens
  misc_feature (61)..(62): /note="This region represents a CpG dinucleotide"
  misc_feature (61)..(61): /note="Nucleotide may be methylated to form 5-methylcytosine"
attgtgtagcctactatgctcctagggtattgctcataggctgcaaatctgtacagcatgcgattgaactgaattttgtaggtagttgtaacaaaatggtatttgtgtgtatctacacatag

SEQ ID NO: 13371 - DNA, 122 bp, Homo sapiens
  misc_feature (61)..(62): /note="This region represents a CpG dinucleotide"
  misc_feature (61)..(61): /note="Nucleotide may be methylated to form 5-methylcytosine"
tgtcgaagagccatctccagttccacccagttcatcttcatcagaacatctatgagtcgtcgtctctgcagtccatttgtttgcccgcttgggaacagcaagctccttaagggcaggactac

SEQ ID NO: 13372 - DNA, 122 bp, Homo sapiens
  misc_feature (61)..(62): /note="This region represents a CpG dinucleotide"
  misc_feature (61)..(61): /note="Nucleotide may be methylated to form 5-methylcytosine"
tgtctgttttgtgatgactaacctggtgatgtcagaggcccaacattttaatattttcaacggatgaaatatggcatagaatttagagaaagtcataagtcatagatgggtttaaaaataag

SEQ ID NO: 13373 - DNA, 122 bp, Homo sapiens
  misc_feature (61)..(62): /note="This region represents a CpG dinucleotide"
  misc_feature (61)..(61): /note="Nucleotide may be methylated to form 5-methylcytosine"
ggctagagaggctaatctcaaagggctagaaatgagtcagtttccacgctcaacatcaggcgtgtggcttcctgaagcacagacgaggaagcgttgaatttcaaagagcaaatttttttttt

SEQ ID NO: 13374 - DNA, 122 bp, Homo sapiens
  misc_feature (61)..(62): /note="This region represents a CpG dinucleotide"
  misc_feature (61)..(61): /note="Nucleotide may be methylated to form 5-methylcytosine"
tagcttctgtgagcttatatcagactcatgtctggcctagactttctacaagtgtcctttcggggccatagccacttccttgggaaagaacacttggtaggtggcactgttacctgccctgc

SEQ ID NO: 13375 - DNA, 122 bp, Homo sapiens
  misc_feature (61)..(62): /note="This region represents a CpG dinucleotide"
  misc_feature (61)..(61): /note="Nucleotide may be methylated to form 5-methylcytosine"
ggtcttgcaagtgggacaacagtgtgttctgccagtttgtgtcatcctgccacacctgcacgtcaggcatggagacgtgtccacaaggagcccgtgtctggtgctgagtctcctccaggacg

SEQ ID NO: 13376 - DNA, 122 bp, Homo sapiens
  misc_feature (61)..(62): /note="This region represents a CpG dinucleotide"
  misc_feature (61)..(61): /note="Nucleotide may be methylated to form 5-methylcytosine"
tcacttgtatcaccaactgctcatcagtaaacctcatatctctagaataatctctgctgtcgtatttgtatttctagcatatactatgatgtctgacttagtagcttcataaaaatctattg

SEQ ID NO: 13377 - DNA, 122 bp, Homo sapiens
  misc_feature (61)..(62): /note="This region represents a CpG dinucleotide"
  misc_feature (61)..(61): /note="Nucleotide may be methylated to form 5-methylcytosine"
caaacctcatcaactccatcttaattttcctcataccatagtcattcctgttctacaactcgcaaagaagttttacttctgcaaaaaaataatgaataactcttcactgtgttatgttttcc

SEQ ID NO: 13378 - DNA, 122 bp, Homo sapiens
  misc_feature (61)..(62): /note="This region represents a CpG dinucleotide"
  misc_feature (61)..(61): /note="Nucleotide may be methylated to form 5-methylcytosine"
ctctcgagggcctgagctgtagcttgcacaatggtgccttgactccagaagcaaccagaacgctgtgcatgactgtcagtcatccacgtgttaacagggaggaggcttagagaaagcagcca

SEQ ID NO: 13379 - DNA, 122 bp, Homo sapiens
  misc_feature (61)..(62): /note="This region represents a CpG dinucleotide"
  misc_feature (61)..(61): /note="Nucleotide may be methylated to form 5-methylcytosine"
gcagagcagatgaagcatctgcccgcgagggtgggtggagctgcttgtgaaacgtatcatcgtagcccgggagctgggacactgaagcccggagaaggtgctcatggaggatgggaagggct

SEQ ID NO: 13380 - DNA, 122 bp, Homo sapiens
  misc_feature (61)..(62): /note="This region represents a CpG dinucleotide"
  misc_feature (61)..(61): /note="Nucleotide may be methylated to form 5-methylcytosine"
ctctttactccctttcttcacaacctgtaattccacttattgagcctgctgtgtatgctacgtatgaggaacattattgctaaccctcagaggtttacagaagatgttttattcctaattta

SEQ ID NO: 13381 - DNA, 122 bp, Homo sapiens
  misc_feature (61)..(62): /note="This region represents a CpG dinucleotide"
  misc_feature (61)..(61): /note="Nucleotide may be methylated to form 5-methylcytosine"
tggtgaaactgagaccctgtaaggacacttgaattggccaggagagacaatctgtccctccgtatatattccattttggttggtatcatcaaaaagatttacctacaacctgtggagctcaa

SEQ ID NO: 13382 - DNA, 122 bp, Homo sapiens
  misc_feature (61)..(62): /note="This region represents a CpG dinucleotide"
  misc_feature (61)..(61): /note="Nucleotide may be methylated to form 5-methylcytosine"
ggtctgtagttgctgcagagtaaatggtattcatgtgtctattcagtgaatcaacaaatacgtactgagcacctgctaaatgacagttactgtgcttgacagtgggtatgtgcaatggtgaa

SEQ ID NO: 13383 - DNA, 122 bp, Homo sapiens
  misc_feature (61)..(62): /note="This region represents a CpG dinucleotide"
  misc_feature (61)..(61): /note="Nucleotide may be methylated to form 5-methylcytosine"
aagaccagttagtccagttccagataaagcctggggtttggattccataccaggataatacggcgttcactcaccctggggtatgggtccaactatagagaacaatccacatttgcctccta

SEQ ID NO: 13384 - DNA, 122 bp, Homo sapiens
  misc_feature (61)..(62): /note="This region represents a CpG dinucleotide"
  misc_feature (61)..(61): /note="Nucleotide may be methylated to form 5-methylcytosine"
atgcgaagtgcttacgcagcatccagcacattagttactaaataatggcagctcctgttacgtctggtgtcattcatcatgactaaggccctctcggggaagtgggcagaacatatgatgat

SEQ ID NO: 13385 - DNA, 122 bp, Homo sapiens
  misc_feature (61)..(62): /note="This region represents a CpG dinucleotide"
  misc_feature (61)..(61): /note="Nucleotide may be methylated to form 5-methylcytosine"
tggcaaaacatctcaaatgtagggcttatgacaaaatgaccagagatttgccctgtgactcgctccttattaaaaccaggaaatctccatcctatctggtgagacagctgtgcaggcaactt

SEQ ID NO: 13386 - DNA, 122 bp, Homo sapiens
  misc_feature (61)..(62): /note="This region represents a CpG dinucleotide"
  misc_feature (61)..(61): /note="Nucleotide may be methylated to form 5-methylcytosine"
caggaggccagcagcatatacctgtccaggtaggagaagacatgtggggtgcgatagcagcgcctagctcagtgacaggaagtctctcgtgccttgagaacagaggactctcacactccctt

SEQ ID NO: 13387 - DNA, 122 bp, Homo sapiens
  misc_feature (61)..(62): /note="This region represents a CpG dinucleotide"
  misc_feature (61)..(61): /note="Nucleotide may be methylated to form 5-methylcytosine"
taaaaatgaagaagacagttaatgacgtctcctccctgtctgcctcactgggtaagcattcgcccagccaacatctggaacatcccagttctgcaaagagccacacccttcccagaaagagc

SEQ ID NO: 13388 - DNA, 122 bp, Homo sapiens
  misc_feature (61)..(62): /note="This region represents a CpG dinucleotide"
  misc_feature (61)..(61): /note="Nucleotide may be methylated to form 5-methylcytosine"
tttctaaacatggaaccagttctgccactggcttctgtgcgacactggtgaacttgctcacgtgtttttgggtttcaattcccctgccacattactttgtttaaaagaaccatgatcctaca

SEQ ID NO: 13389 - DNA, 122 bp, Homo sapiens
  misc_feature (61)..(62): /note="This region represents a CpG dinucleotide"
  misc_feature (61)..(61): /note="Nucleotide may be methylated to form 5-methylcytosine"
aggagaagagtttcccttgctaaggctcctttctcttgcccttaccatgagcagatgctacggcagcagcatctcctggctgcttccagacatagtagacttcaggttggctgatgattttg

SEQ ID NO: 13390 - DNA, 122 bp, Homo sapiens
  misc_feature (61)..(62): /note="This region represents a CpG dinucleotide"
  misc_feature (61)..(61): /note="Nucleotide may be methylated to form 5-methylcytosine"
cacccacaaagtgctagttaagcccaggggctgactgtcatgccacggctgtgagacacacgcctgcttggatggcacacccctgtctggcatttggggccttgtcattaagagctaatgca

SEQ ID NO: 13391 - DNA, 122 bp, Homo sapiens
  misc_feature (61)..(62): /note="This region represents a CpG dinucleotide"
  misc_feature (61)..(61): /note="Nucleotide may be methylated to form 5-methylcytosine"
gtttctggctcagcctcactgcctcacaatctcaaatgcaacaaaaacattttacttcttcgtccttcaaagtcattaacttgcgcatgatctcagagtgtgcaaagattttctaaacagaa

SEQ ID NO: 13392 - DNA, 122 bp, Homo sapiens
  misc_feature (61)..(62): /note="This region represents a CpG dinucleotide"
  misc_feature (61)..(61): /note="Nucleotide may be methylated to form 5-methylcytosine"
ctgctagagcagtacatgaagtgctctctgggaaagtgcttgaagagcataaatcctttacgaaaaggtaacagtcaagctactgaagacactaggcagaagggcctggactgcctttgcag

SEQ ID NO: 13393 - DNA, 122 bp, Homo sapiens
  misc_feature (61)..(62): /note="This region represents a CpG dinucleotide"
  misc_feature (61)..(61): /note="Nucleotide may be methylated to form 5-methylcytosine"
gtcactgagccagcagacagtctggcttcagagcttgtgttcccagctcctgtgggaagccgttctcactacccccaccagaaggttcgtgaaggtttatggaagaccagacaggctgggag

SEQ ID NO: 13394 - DNA, 122 bp, Homo sapiens
  misc_feature (61)..(62): /note="This region represents a CpG dinucleotide"
  misc_feature (61)..(61): /note="Nucleotide may be methylated to form 5-methylcytosine"
cagaatctctacctgcaggccacacccagctccacctcagatatgtagtgagtgaccacacgtgtgggttggagtcccacccaaagctccctggaccctagaaggcatagggtgggggcagt

SEQ ID NO: 13395 - DNA, 122 bp, Homo sapiens
  misc_feature (61)..(62): /note="This region represents a CpG dinucleotide"
  misc_feature (61)..(61): /note="Nucleotide may be methylated to form 5-methylcytosine"
cacccaggtgtcccttcatggagatgaactcagtgacttcccacaagaagccactggctacggctctcatcgttcttgttctttggatgaagaggctgagtcactggccatgtggctgggat

SEQ ID NO: 13396 - DNA, 122 bp, Homo sapiens
  misc_feature (61)..(62): /note="This region represents a CpG dinucleotide"
  misc_feature (61)..(61): /note="Nucleotide may be methylated to form 5-methylcytosine"
acctcggcctcccaaagtgctgggattacaggcgtgagccactaagcccggccagcaacacgcttttaccgctgcaaatccggatcaggcaggctttgaagcccagctcacaggccgtctct

SEQ ID NO: 13397 - DNA, 122 bp, Homo sapiens
  misc_feature (61)..(62): /note="This region represents a CpG dinucleotide"
  misc_feature (61)..(61): /note="Nucleotide may be methylated to form 5-methylcytosine"
attgagtgtacatgttttcctatgcaggttagagacttcagagtagctaataaggagccacgacatgggcctaagagaagagaagatagtactcaagtggagtttctgcttagggcagcaat

SEQ ID NO: 13398 - DNA, 122 bp, Homo sapiens
  misc_feature (61)..(62): /note="This region represents a CpG dinucleotide"
  misc_feature (61)..(61): /note="Nucleotide may be methylated to form 5-methylcytosine"
ctctcctggcagggctgtcttcataagggatgatttgcttgaccaaaacaaactcacttgcgctaacttaaacacagggaaagcaatcctgaggagttaggttatcttgcaggtcacaagga

SEQ ID NO: 13399 - DNA, 122 bp, Homo sapiens
  misc_feature (61)..(62): /note="This region represents a CpG dinucleotide"
  misc_feature (61)..(61): /note="Nucleotide may be methylated to form 5-methylcytosine"
gacgtgtactgcatgtatccaccactgggcagtgtgcctcacaagtgagactgatgctcacgtgagcttgtgaagtcaggggcaaaacattgcaatcagactctaaacccatacatttaaat

SEQ ID NO: 13400 - DNA, 122 bp, Homo sapiens
  misc_feature (61)..(62): /note="This region represents a CpG dinucleotide"
  misc_feature (61)..(61): /note="Nucleotide may be methylated to form 5-methylcytosine"
gggatctgcttatgattctaataagtccttctctgtcaagaaccaggatgcagcaaacagcgcatgtttaagcccatgcactttggagccaggcagagctgtgttgtcttggctctcttgct

SEQ ID NO: 13401 - DNA, 122 bp, Homo sapiens
  misc_feature (61)..(62): /note="This region represents a CpG dinucleotide"
  misc_feature (61)..(61): /note="Nucleotide may be methylated to form 5-methylcytosine"
caatcaaataaagtgcataggtcattggttttaaatagatttacagagttctgcaaccatcgccactaaggctctaatttcagaacattatcactctaagaagaaaccccagacccattagc

SEQ ID NO: 13402 - DNA, 122 bp, Homo sapiens
  misc_feature (61)..(62): /note="This region represents a CpG dinucleotide"
  misc_feature (61)..(61): /note="Nucleotide may be methylated to form 5-methylcytosine"
tcttggaccccaggaaatggcgtgccacgtgctcaggcaacatgttggtgaccaaggcctcgttccagcgtcgcatctcatagacacgttccttctggtcgtggacctcaatcttccacaag

SEQ ID NO: 13403 - DNA, 122 bp, Homo sapiens
  misc_feature (61)..(62): /note="This region represents a CpG dinucleotide"
  misc_feature (61)..(61): /note="Nucleotide may be methylated to form 5-methylcytosine"
ccccacttcccattcaaggagactaaggcagagagatcaaataacttgcacaaggccacacgaatagtaagtggcagatgcaagagctaaatccagtagtctgagtctgaagctcacaagtt

SEQ ID NO: 13404 - DNA, 122 bp, Homo sapiens
  misc_feature (61)..(62): /note="This region represents a CpG dinucleotide"
  misc_feature (61)..(61): /note="Nucleotide may be methylated to form 5-methylcytosine"
acctgcccattttaagccctgtcagcaacacaaagacttaaaccgaagtgaaatacagggcgcattatccctttaagcccttgagttaactcaaggggactgaaaggcatgtctgtatttct

SEQ ID NO: 13405 - DNA, 122 bp, Homo sapiens
  misc_feature (61)..(62): /note="This region represents a CpG dinucleotide"
  misc_feature (61)..(61): /note="Nucleotide may be methylated to form 5-methylcytosine"
ccaggcactcagtggtgtcacctcaggaggttccgatgacctcacatcaaggtggtgtgccgatgcaggagcaatgcaggccctgaatgttgccccacctgatgcggccactcagctgaccg

SEQ ID NO: 13406 - DNA, 122 bp, Homo sapiens
  misc_feature (61)..(62): /note="This region represents a CpG dinucleotide"
  misc_feature (61)..(61): /note="Nucleotide may be methylated to form 5-methylcytosine"
taaagcccttactcagcacaaggcatagtgccaggctctgggatgcatagatgagggatacgtcataggcatcattgtgttcttaaagtaggcattgttgcagggagtattgagtgtaggaa

SEQ ID NO: 13407 - DNA, 122 bp, Homo sapiens
  misc_feature (61)..(62): /note="This region represents a CpG dinucleotide"
  misc_feature (61)..(61): /note="Nucleotide may be methylated to form 5-methylcytosine"
tatcaaaaaaataataatataaataaaataaattagtgaacccacaaatcagcctgcttacgtcagggcctgaaccaacaggctattccagctgccgccccgtgagccacaggccactctct

SEQ ID NO: 13408 - DNA, 122 bp, Homo sapiens
  misc_feature (61)..(62): /note="This region represents a CpG dinucleotide"
  misc_feature (61)..(61): /note="Nucleotide may be methylated to form 5-methylcytosine"
ctttctaattgctacccttagcactcagggatgttttctcggacctcacccagagctatacgtaggatcaaatggaaatacgggatcattaactcagccctggaatgcagtctagcagcatt

SEQ ID NO: 13409 - DNA, 122 bp, Homo sapiens
  misc_feature (61)..(62): /note="This region represents a CpG dinucleotide"
  misc_feature (61)..(61): /note="Nucleotide may be methylated to form 5-methylcytosine"
ggcctgatgcgaatagggcaggcctgtgaacagagcaaagacgagtcacttaggaggggacgagagaggccagcggtaaactaatattaccagctcagggtttatttgtcaaagcctccttt

SEQ ID NO: 13410 - DNA, 122 bp, Homo sapiens
  misc_feature (61)..(62): /note="This region represents a CpG dinucleotide"
  misc_feature (61)..(61): /note="Nucleotide may be methylated to form 5-methylcytosine"
tccagatgccccagaccacacccaccctgacaaatcaagagaccaagaactcaatctctgcggcccaggccctaaggacagcagtccagcacagggatgacatcattccgaaggacaggcag

SEQ ID NO: 13411 - DNA, 122 bp, Homo sapiens
  misc_feature (61)..(62): /note="This region represents a CpG dinucleotide"
  misc_feature (61)..(61): /note="Nucleotide may be methylated to form 5-methylcytosine"
aagaacagtcatgaaattccccaatgatgcgatgatcaaaagtccttcaattgactgttacgtttcctatgtacttccaaactgtttgtattacctgttctaacctctcccctatcttcacc

SEQ ID NO: 13412 - DNA, 122 bp, Homo sapiens
  misc_feature (61)..(62): /note="This region represents a CpG dinucleotide"
  misc_feature (61)..(61): /note="Nucleotide may be methylated to form 5-methylcytosine"
agagatggctgatgactgttggagtcgaagaggaatgaaatgccagaggtgtcatcaagacggacttgcttctggggtgggaatgactcaaagagccctgcccagggccacatctcaccaga

SEQ ID NO: 13413 - DNA, 122 bp, Homo sapiens
  misc_feature (61)..(62): /note="This region represents a CpG dinucleotide"
  misc_feature (61)..(61): /note="Nucleotide may be methylated to form 5-methylcytosine"
tgaagaagcgacccactcccactgccgcatgccctacgaaggggacaagggaacctttcccgtttcattgttagaggtcaaagctttttccatggcacatgcccagtctacataacttgcag

SEQ ID NO: 13414 - DNA, 122 bp, Homo sapiens
  misc_feature (61)..(62): /note="This region represents a CpG dinucleotide"
  misc_feature (61)..(61): /note="Nucleotide may be methylated to form 5-methylcytosine"
tgagatcagctggggaactctctcccaggaaagacaaaccagaagaaacacaaatgacatcgaagtggccaggcgcagtggctcacgcctgtaatcccagcactttgggagcccgaggcagg

SEQ ID NO: 13415 - DNA, 122 bp, Homo sapiens
  misc_feature (61)..(62): /note="This region represents a CpG dinucleotide"
  misc_feature (61)..(61): /note="Nucleotide may be methylated to form 5-methylcytosine"
gcctgaagacagagaggtaagaagccacaagagttttcgtggtggagggagttagttatgcggtaattgcaataatggcttatctgactgtgcaaccatggccaagggcttaacagcctttg

SEQ ID NO: 13416 - DNA, 122 bp, Homo sapiens
  misc_feature (61)..(62): /note="This region represents a CpG dinucleotide"
  misc_feature (61)..(61): /note="Nucleotide may be methylated to form 5-methylcytosine"
ttccccaggcactgcttagctccgtatactggtctcccaggaggcagagccaatctctagcgcctattctgtgaggcagggttgcaccaccagctagtacagccttaaaagtcactccccaa

SEQ ID NO: 13417 - DNA, 122 bp, Homo sapiens
  misc_feature (61)..(62): /note="This region represents a CpG dinucleotide"
  misc_feature (61)..(61): /note="Nucleotide may be methylated to form 5-methylcytosine"
ggattattttagagatttatgacaattccatttgttcctatataggggatctgagcttgacgcttgatgctggatttgactaactccctgcaaagccagcagggtgtagatgtgtattacca

SEQ ID NO: 13418 - DNA, 122 bp, Homo sapiens
  misc_feature (61)..(62): /note="This region represents a CpG dinucleotide"
  misc_feature (61)..(61): /note="Nucleotide may be methylated to form 5-methylcytosine"
ctagggatttcatcagaaacgggtgtggttctctctgctgggatgagcccatctttgttgcgctgtatcatccaagaacaactatggagtctgggaagggtgattggtcattccagtccagc

SEQ ID NO: 13419 - DNA, 122 bp, Homo sapiens
  misc_feature (61)..(62): /note="This region represents a CpG dinucleotide"
  misc_feature (61)..(61): /note="Nucleotide may be methylated to form 5-methylcytosine"
ggaacttttcatgtggttacgtagccttggaagaatatgtacctaactgctaccctatatcgtctctccaaaattgggtaccattattttgtcactggatagttggatcatttgttgatggc

SEQ ID NO: 13420 - DNA, 122 bp, Homo sapiens
  misc_feature (61)..(62): /note="This region represents a CpG dinucleotide"
  misc_feature (61)..(61): /note="Nucleotide may be methylated to form 5-methylcytosine"
caacttggagttgtgacaagttaaggagaaaagctagtgataggagacaaagggctgcttcgctttactcaatgctcagtgagtcatgaggtggctgcccccaggcctccaagttgtcactt

SEQ ID NO: 13421 - DNA, 122 bp, Homo sapiens
  misc_feature (61)..(62): /note="This region represents a CpG dinucleotide"
  misc_feature (61)..(61): /note="Nucleotide may be methylated to form 5-methylcytosine"
ggacacagaactggatcgcgaggagcaggccgagctcagattaaccttgacagcggtggacggtggctctccaccccgatctggcaccgtccagatcctcatcttggtcttggacgccaatg

SEQ ID NO: 13422 - DNA, 122 bp, Homo sapiens
  misc_feature (61)..(62): /note="This region represents a CpG dinucleotide"
  misc_feature (61)..(61): /note="Nucleotide may be methylated to form 5-methylcytosine"
tacaggcgtgagccaccgcacctggtcttcaagaatgtttctgctttttaaaatttctgacgtgtagcaggcttgagaatcaagtttagactctgacattgtaaaataaaaaatcttacttt

SEQ ID NO: 13423 - DNA, 122 bp, Homo sapiens
  misc_feature (61)..(62): /note="This region represents a CpG dinucleotide"
  misc_feature (61)..(61): /note="Nucleotide may be methylated to form 5-methylcytosine"
cccccgctgaggtttgagccctgtgcatattctagcacttgccacactctgtcttgttagcgcctgtggctgtctgctctgcatctgtgagcacagtccttgctggtctgattcatcaggtg

SEQ ID NO: 13424 - DNA, 122 bp, Homo sapiens
  misc_feature (61)..(62): /note="This region represents a CpG dinucleotide"
  misc_feature (61)..(61): /note="Nucleotide may be methylated to form 5-methylcytosine"
gcccaggcggtgcgactcagggatggtgtaggagacacgcccactgttgttggtcaccagcgtatccaggtagagccactcgcctgagggcggctgggtcatgatgtgcacatccacctggg

SEQ ID NO: 13425 - DNA, 122 bp, Homo sapiens
  misc_feature (61)..(62): /note="This region represents a CpG dinucleotide"
  misc_feature (61)..(61): /note="Nucleotide may be methylated to form 5-methylcytosine"
gattttccttggccagctgtgaagtcctcactgcggtgttgcctgctgccgggctcagggcggcgtcatctccccacgggcctctaagccctgttgcccccgcactctgtgtgtccacaggg

SEQ ID NO: 13426 - DNA, 122 bp, Homo sapiens
  misc_feature (61)..(62): /note="This region represents a CpG dinucleotide"
  misc_feature (61)..(61): /note="Nucleotide may be methylated to form 5-methylcytosine"
actacagtgattggtagacagtttggtctgtggtgaactttttttttcctcttcagcttgcggaaggagctaatgctgcttatttgcagttgttgaacctgtttgcctatgggacataccca

SEQ ID NO: 13427 - DNA, 122 bp, Homo sapiens
  misc_feature (61)..(62): /note="This region represents a CpG dinucleotide"
  misc_feature (61)..(61): /note="Nucleotide may be methylated to form 5-methylcytosine"
ctccaagatacacctgtttattaaaccttccgccaagatacacccatttatgaaacccttcgccatgatgcacctgtttattaaacccttcccctagatacacccgtttattaaacccttcg

SEQ ID NO: 13428 - DNA, 122 bp, Homo sapiens
  misc_feature (61)..(62): /note="This region represents a CpG dinucleotide"
  misc_feature (61)..(61): /note="Nucleotide may be methylated to form 5-methylcytosine"
accaaatggaatcttgaagcctaaaccctcacatgactcagtcataaggttttggacttacgtagtcttatctgaggaactcagagtgcatccgcttcattaatgcttgctcacaatattct

SEQ ID NO: 13429 - DNA, 122 bp, Homo sapiens
  misc_feature (61)..(62): /note="This region represents a CpG dinucleotide"
  misc_feature (61)..(61): /note="Nucleotide may be methylated to form 5-methylcytosine"
tcaggattgtctcataaatgatgtgctgtggggcattggtgctggctacacatcaagctgcgaaatagccaagtttggtctggtgccttttcttctcttttttcacactgtaagcattaaaa

SEQ ID NO: 13430 - DNA, 122 bp, Homo sapiens
  misc_feature (61)..(62): /note="This region represents a CpG dinucleotide"
  misc_feature (61)..(61): /note="Nucleotide may be methylated to form 5-methylcytosine"
ttatggagacactaatcctgtgggatcacggcccaaacctgatgacttcatttagcctcacgtacttctttacaccaaatacagccacacttgggattaggacttcaacatatgaattttgg

SEQ ID NO: 13431 - DNA, 122 bp, Homo sapiens
  misc_feature (61)..(62): /note="This region represents a CpG dinucleotide"
  misc_feature (61)..(61): /note="Nucleotide may be methylated to form 5-methylcytosine"
tgagcagatccatgtctagagagagggaagtgagtcacctgaggtgaccggtgaaggtgacggagagggagttaaccgagacagagaagattccgtagatggtagaacattgttagaatcag

SEQ ID NO: 13432 - DNA, 122 bp, Homo sapiens
  misc_feature (61)..(62): /note="This region represents a CpG dinucleotide"
  misc_feature (61)..(61): /note="Nucleotide may be methylated to form 5-methylcytosine"
aattgcgtgttgttctaagttgatgaaatctcttgccatcccattctgtcctacctgggacgtgagtcacccctttgtccggcattccattaaacgcccattagtcactgacatcctctgct

SEQ ID NO: 13433 - DNA, 122 bp, Homo sapiens
  misc_feature (61)..(62): /note="This region represents a CpG dinucleotide"
  misc_feature (61)..(61): /note="Nucleotide may be methylated to form 5-methylcytosine"
acctgttcttgagtgtgttgagcatgccgtagagcgtcacatcattccactcccaggtgtcgatgtgatcgttgcttatattggcaaagctgtagatgatgtgggtacagaggaagcggtca

SEQ ID NO: 13434 - DNA, 122 bp, Homo sapiens
  misc_feature (61)..(62): /note="This region represents a CpG dinucleotide"
  misc_feature (61)..(61): /note="Nucleotide may be methylated to form 5-methylcytosine"
tttacagaaaatttctgggctgtttgacatcaccactgagagcagctagaatttgaatggcggggatactttaaaagctcagaactatagccaggcgtggtgactcactcctgtaatcccca

SEQ ID NO: 13435 - DNA, 122 bp, Homo sapiens
  misc_feature (61)..(62): /note="This region represents a CpG dinucleotide"
  misc_feature (61)..(61): /note="Nucleotide may be methylated to form 5-methylcytosine"
acctggccctggaggaaggttctgggtcagctgcaatgagagactggtgattaagggcaccgtgggcaggacacagtcctcgccttacccaccccatccttcctgttacccacagtctgctg

SEQ ID NO: 13436 - DNA, 122 bp, Homo sapiens
  misc_feature (61)..(62): /note="This region represents a CpG dinucleotide"
  misc_feature (61)..(61): /note="Nucleotide may be methylated to form 5-methylcytosine"
caggagactagaggcaggaaagagagcaatgagctgagggtggctaagctgggaggtgagcgagggtgccctggctgagaccttgaaaaactccacccatgatgatcaccattatactcctc

SEQ ID NO: 13437 - DNA, 122 bp, Homo sapiens
  misc_feature (61)..(62): /note="This region represents a CpG dinucleotide"
  misc_feature (61)..(61): /note="Nucleotide may be methylated to form 5-methylcytosine"
ctcaggtgatccacccgcctcggcctcccaaagtgctgggattacaggcatgagccactgcgcccggccgtagtcaacagtttagagtcaacagccccagctgtcactcacaagtgtcattc

SEQ ID NO: 13438 - DNA, 122 bp, Homo sapiens
  misc_feature (61)..(62): /note="This region represents a CpG dinucleotide"
  misc_feature (61)..(61): /note="Nucleotide may be methylated to form 5-methylcytosine"
gctctgctccaagcaccccgggcataaaggcgggccttggctcggtcaagagtccaggcacgcacactggcataaaacactcctccgaaggaatatggaaatgttccattttactttgttca

SEQ ID NO: 13439 - DNA, 122 bp, Homo sapiens
  misc_feature (61)..(62): /note="This region represents a CpG dinucleotide"
  misc_feature (61)..(61): /note="Nucleotide may be methylated to form 5-methylcytosine"
agttctgagttctatcaccattgattcagatggctgattcattcttgatctacatataaacggaatcttacagcatatactctttttgtctggcttctctgcttaacataatgttctgaaga

SEQ ID NO: 13440 - DNA, 122 bp, Homo sapiens
  misc_feature (61)..(62): /note="This region represents a CpG dinucleotide"
  misc_feature (61)..(61): /note="Nucleotide may be methylated to form 5-methylcytosine"
atatattcatcattttacttagcaatcttacttgtgggaatctatcctatagatacagtacgaaatgtacaataggcctagcgcagtggctcaggcatgtaatcccagtactttgggaggcc

SEQ ID NO: 13441 - DNA, 122 bp, Homo sapiens
  misc_feature (61)..(62): /note="This region represents a CpG dinucleotide"
  misc_feature (61)..(61): /note="Nucleotide may be methylated to form 5-methylcytosine"
gctgtggacccgggaccgggcgccgctgggcgggcgcggcagggtcccggatccgtcctccgtgacgcgccggcttcctccggacactttccggcctcttttgtgtgagtgtgtgagtcaag

SEQ ID NO: 13442 - DNA, 122 bp, Homo sapiens
  misc_feature (61)..(62): /note="This region represents a CpG dinucleotide"
  misc_feature (61)..(61): /note="Nucleotide may be methylated to form 5-methylcytosine"
tctgctggaggaggatattgttttgacagttgaaatctgactaatggtaacctgatagaacgtgaataatgagatgatgcttatagtttgaggacaaggagcttgtctttggcctgtgagtc

SEQ ID NO: 13443 - DNA, 122 bp, Homo sapiens
  misc_feature (61)..(62): /note="This region represents a CpG dinucleotide"
  misc_feature (61)..(61): /note="Nucleotide may be methylated to form 5-methylcytosine"
agagcccatcaatcaggtggggggcagagtgagttttacagactctagaaccaagtgctgcgttcaacacaggctgccctacttgctgagtgacctcaggccggttctctgacctctctgtg

SEQ ID NO: 13444 - DNA, 122 bp, Homo sapiens
  misc_feature (61)..(62): /note="This region represents a CpG dinucleotide"
  misc_feature (61)..(61): /note="Nucleotide may be methylated to form 5-methylcytosine"
cacagtcaatctgatgacccggtcggctactaagtgactaaccgcagggagtggtggagacgctggacaaagggatgattcacgtcctgggtgggaccgagcgggacggtgggagatttcat

SEQ ID NO: 13445 - DNA, 122 bp, Homo sapiens
  misc_feature (61)..(62): /note="This region represents a CpG dinucleotide"
  misc_feature (61)..(61): /note="Nucleotide may be methylated to form 5-methylcytosine"
ctttctgtgatcatttaaatatagagctgcatatcattttctactcatactatgttgcaacgctttacccaagagttattggcaacggaaaccagcctgtttaagatgaatgacacacccat

SEQ ID NO: 13446 - DNA, 122 bp, Homo sapiens
  misc_feature (61)..(62): /note="This region represents a CpG dinucleotide"
  misc_feature (61)..(61): /note="Nucleotide may be methylated to form 5-methylcytosine"
cacccctgtgctgaaggtattgaaaggaataagacacagtctctcctccagagtctgtggcgtagacagtgagtcatcggatgctacaatgtgctgtgataaatgtatcacagggacagtgc

SEQ ID NO: 13447 - DNA, 122 bp, Homo sapiens
  misc_feature (61)..(62): /note="This region represents a CpG dinucleotide"
  misc_feature (61)..(61): /note="Nucleotide may be methylated to form 5-methylcytosine"
gtgtctcctacaatcctattactcatcaactggcatcttgttcctccagtgactttggtacgttctgattcctgatgtcctgtcctggaataactgaaaatctgggctaaaaatgctaaaat

SEQ ID NO: 13448 - DNA, 122 bp, Homo sapiens
  misc_feature (61)..(62): /note="This region represents a CpG dinucleotide"
  misc_feature (61)..(61): /note="Nucleotide may be methylated to form 5-methylcytosine"
caccacgcacagctaatttttgtatttttttggtagatacagggtagagaataacgaagacgtacttatagaagcagaggctggaggccatgatttcccagacagaaagaaacagaaagaga

SEQ ID NO: 13449 - DNA, 122 bp, Homo sapiens
  misc_feature (61)..(62): /note="This region represents a CpG dinucleotide"
  misc_feature (61)..(61): /note="Nucleotide may be methylated to form 5-methylcytosine"
tttctttccttctggttacttcgtttagtctgttcattttttatgatcatactataatgacggaggctaactcttgcttagtacgtggcaggcactatgccaaatcatctacaggaattatc

SEQ ID NO: 13450 - DNA, 122 bp, Homo sapiens
  misc_feature (61)..(62): /note="This region represents a CpG dinucleotide"
  misc_feature (61)..(61): /note="Nucleotide may be methylated to form 5-methylcytosine"
atgtcacttatagctgtggaaccctggacaacttatttaatctctttgtccttcaaattccgtatatgtagaatgtgggtgatgataatacctaccacatagggttattgtgaggattaaat

SEQ ID NO: 13451 - DNA, 122 bp, Homo sapiens
  misc_feature (61)..(62): /note="This region represents a CpG dinucleotide"
  misc_feature (61)..(61): /note="Nucleotide may be methylated to form 5-methylcytosine"
atgaccactgctcctggttcatgattttcttctcaaccttgtctcctgttgttctcaagacgtcaacatccattgtattagttatctatgactacatatcaagtcactccaccttagcagct

SEQ ID NO: 13452 - DNA, 122 bp, Homo sapiens
  misc_feature (61)..(62): /note="This region represents a CpG dinucleotide"
  misc_feature (61)..(61): /note="Nucleotide may be methylated to form 5-methylcytosine"
aatcattacatctcctctcctcgctacaaatgcaaggcatgaatcaggtatgcagaggcacgcactgccagatggaaatgagaaaggatgtccagagagatatatggaagaggtcaagaaca

SEQ ID NO: 13453 - DNA, 122 bp, Homo sapiens
  misc_feature (61)..(62): /note="This region represents a CpG dinucleotide"
  misc_feature (61)..(61): /note="Nucleotide may be methylated to form 5-methylcytosine"
aaattgacttagcaaatatgccttggacagccttgccagcaactggataaggatcatctacgccatgctagattaccaggagagagagggccacacctgagggccagaggggatgagtcaca

SEQ ID NO: 13454 - DNA, 122 bp, Homo sapiens
  misc_feature (61)..(62): /note="This region represents a CpG dinucleotide"
  misc_feature (61)..(61): /note="Nucleotide may be methylated to form 5-methylcytosine"
ctcaggtgatccgcccgccttgacctcccaaagtgctgggattataggcttgagccaccgcgcctgctccagatgtattacttaatgtcctgcaacatcctctaatctgcctccaggggaag

SEQ ID NO: 13455 - DNA, 122 bp, Homo sapiens
  misc_feature (61)..(62): /note="This region represents a CpG dinucleotide"
  misc_feature (61)..(61): /note="Nucleotide may be methylated to form 5-methylcytosine"
gatgttctccaaaggtgcaaaatgaggttgttgagaaaggtggtgtgtggctggttgatgcgaggctttgagtccgcctgcctgtgaagtttgattttgaaatctcagcctcttagaagcct

SEQ ID NO: 13456 - DNA, 122 bp, Homo sapiens
  misc_feature (61)..(62): /note="This region represents a CpG dinucleotide"
  misc_feature (61)..(61): /note="Nucleotide may be methylated to form 5-methylcytosine"
cacaggctgggagttctcacgccctgcaggctttcatcatcctgacctttccaactagaacgtcgtcttttgctggctaatttgtaactgcccttcaagattcactggggatcagaaggctt

SEQ ID NO: 13457 - DNA, 122 bp, Homo sapiens
  misc_feature (61)..(62): /note="This region represents a CpG dinucleotide"
  misc_feature (61)..(61): /note="Nucleotide may be methylated to form 5-methylcytosine"
tctctattaagggctttattttatatataagaaaaccgatgcttagagagatgaagtcaccggcccaaggtcacacagcaggttcaaaggattaggaattgaattccggccaatgtgggttc

SEQ ID NO: 13458 - DNA, 122 bp, Homo sapiens
  misc_feature (61)..(62): /note="This region represents a CpG dinucleotide"
  misc_feature (61)..(61): /note="Nucleotide may be methylated to form 5-methylcytosine"
agaactagtggtggtgggatggtatttggtacagaggagggaatgttctgccatctggtccgagaagaagagaaggtcaatttgcctagaaagaagaatgaagctgactcacaaagaagcag

SEQ ID NO: 13459 - DNA, 122 bp, Homo sapiens
  misc_feature (61)..(62): /note="This region represents a CpG dinucleotide"
  misc_feature (61)..(61): /note="Nucleotide may be methylated to form 5-methylcytosine"
aagatgtctagtctctctgctgagccactttccttaatgtcttgaatgaattttcacagacgtggcatgtagcagtgaaactgttgttaccagtggttaagtttacatttgaggcaccccga

SEQ ID NO: 13460 - DNA, 122 bp, Homo sapiens
  misc_feature (61)..(62): /note="This region represents a CpG dinucleotide"
  misc_feature (61)..(61): /note="Nucleotide may be methylated to form 5-methylcytosine"
gagaatgtttctttgccttttccagcctctagagactgccctcattccgtggcttgtggtcgccttccagtcagcatttgtgtgattctgacctttgcttctaatgacacatctccttctat

SEQ ID NO: 13461 - DNA, 122 bp, Homo sapiens
  misc_feature (61)..(62): /note="This region represents a CpG dinucleotide"
  misc_feature (61)..(61): /note="Nucleotide may be methylated to form 5-methylcytosine"
aattctcacaggacctgattgtccctttggtgaaatcacctcggcagacactgtcctttacgttcctcagcatctgctatatggaaaccgacacaaatcctctttgaattttctgccttcct

SEQ ID NO: 13462 - DNA, 122 bp, Homo sapiens
  misc_feature (61)..(62): /note="This region represents a CpG dinucleotide"
  misc_feature (61)..(61): /note="Nucleotide may be methylated to form 5-methylcytosine"
taaggatgggctctttgacaggcagagctgtcccatgatagaactgatggccctcaatgacgtgggttcctggtctctggaggagcccagcgaagctgcaggatctcttggcaggaggctgc

SEQ ID NO: 13463 - DNA, 122 bp, Homo sapiens
  misc_feature (61)..(62): /note="This region represents a CpG dinucleotide"
  misc_feature (61)..(61): /note="Nucleotide may be methylated to form 5-methylcytosine"
gtcagctaaggtaaccatttaatgcctgacaacaagtgagtcaagaacactacaaagaaccggatggacagcacttttatttgatgaatgacctgaactacaaaccgagcagacctcaatat

SEQ ID NO: 13464 - DNA, 122 bp, Homo sapiens
  misc_feature (61)..(62): /note="This region represents a CpG dinucleotide"
  misc_feature (61)..(61): /note="Nucleotide may be methylated to form 5-methylcytosine"
atcagtaggcattttgttgtataacacaccctatagcagcatgaatgaagtaaggattggcgagatcttgagaagctcacacagttgcagaattcttgctatagttggcctcttctgtctgt

SEQ ID NO: 13465 - DNA, 122 bp, Homo sapiens
  misc_feature (61)..(62): /note="This region represents a CpG dinucleotide"
  misc_feature (61)..(61): /note="Nucleotide may be methylated to form 5-methylcytosine"
gcaagagcagctgtcattgcttttttcctggtcttagagggatcatgtgcaattaggatccgtcaagtatgatgctagctgtagagttgttcgatgtgctttctgtcagattgaggaaattc

SEQ ID NO: 13466 - DNA, 122 bp, Homo sapiens
  misc_feature (61)..(62): /note="This region represents a CpG dinucleotide"
  misc_feature (61)..(61): /note="Nucleotide may be methylated to form 5-methylcytosine"
gccatgtcctccaatcagtcaacagaggagacaatttgatctccatctggcagtctcctgcgccttacttctcaaggaaaagaaacagtatcacttagtgactccctggaacccaccaaatc

SEQ ID NO: 13467 - DNA, 122 bp, Homo sapiens
  misc_feature (61)..(62): /note="This region represents a CpG dinucleotide"
  misc_feature (61)..(61): /note="Nucleotide may be methylated to form 5-methylcytosine"
agaggagaatgatgctgagattaaagcctctcccctggagtgattctatgtggcctgttgcgttggtgcagagaggcaaggcaataaggccttctggggttcagcagagagacaggtcaaac

SEQ ID NO: 13468 - DNA, 122 bp, Homo sapiens
  misc_feature (61)..(62): /note="This region represents a CpG dinucleotide"
  misc_feature (61)..(61): /note="Nucleotide may be methylated to form 5-methylcytosine"
tttcaaaacaaacaaaaaaacaaacccacagcagtgctctcctgagtatgcagcctgcagcgtgagtgactacacaggttgcacagccatgaagctggccccgctaatctctctgtaagaat

SEQ ID NO: 13469 - DNA, 122 bp, Homo sapiens
  misc_feature (61)..(62): /note="This region represents a CpG dinucleotide"
  misc_feature (61)..(61): /note="Nucleotide may be methylated to form 5-methylcytosine"
aggaagagcaggttcacccacacattcacaagtcaccctaaagctcgctccagccaggcacggtctatacactgtgataaggatgtggccgcacagaacagacccacaggaacacagcagat

SEQ ID NO: 13470 - DNA, 122 bp, Homo sapiens
  misc_feature (61)..(62): /note="This region represents a CpG dinucleotide"
  misc_feature (61)..(61): /note="Nucleotide may be methylated to form 5-methylcytosine"
aagtctttctggtcttgctggtcagagccagaagggccagtgcccggtccaggagcctctcgcaggccttgggctgcccatccaggcgtggcctttccttggccctttggacgacgacgccg

SEQ ID NO: 13471 - DNA, 122 bp, Homo sapiens
  misc_feature (61)..(62): /note="This region represents a CpG dinucleotide"
  misc_feature (61)..(61): /note="Nucleotide may be methylated to form 5-methylcytosine"
ggagacaaagcttggagcctacatttacaaactgtcatgagccagccccacctagaagcacgctaagcttgttttagtcatctcatttctctctagcccatgggccaaccttattcctgctt

SEQ ID NO: 13472 - DNA, 122 bp, Homo sapiens
  misc_feature (61)..(62): /note="This region represents a CpG dinucleotide"
  misc_feature (61)..(61): /note="Nucleotide may be methylated to form 5-methylcytosine"
acactcctctgtgaatcatgacagctcagctgggaaatgcagaactgtatcataagagggcgagatcatgggagtgagacaatgatgaggcctatgacattggaaggtggtgagttcatcat

SEQ ID NO: 13473 - DNA, 122 bp, Homo sapiens
  misc_feature (61)..(62): /note="This region represents a CpG dinucleotide"
  misc_feature (61)..(61): /note="Nucleotide may be methylated to form 5-methylcytosine"
gggataaacacaggtgcactttgtcacagtgacagagtcaatgggcattcatttctaacacggcaagcatcatttgaatgaagacagcagccatcagttaaataaatagttatgctgtccta

SEQ ID NO: 13474 - DNA, 122 bp, Homo sapiens
  misc_feature (61)..(62): /note="This region represents a CpG dinucleotide"
  misc_feature (61)..(61): /note="Nucleotide may be methylated to form 5-methylcytosine"
tattactgcttcagacctgatacaatgacaggatgtgccctgtgaaggatcctggtggcacgtgacccagcacagcatgcaggagatccatggatgaatcacaaggataactgaagaagaga

SEQ ID NO: 13475 - DNA, 122 bp, Homo sapiens
  misc_feature (61)..(62): /note="This region represents a CpG dinucleotide"
  misc_feature (61)..(61): /note="Nucleotide may be methylated to form 5-methylcytosine"
tgagagataactggaaagcctagtgtcctttgtgtttcttggcaacctgctcctggactacgagctgtcctggagaggaacattttctggattcattttgtcacagtggccatcagtagcgt

SEQ ID NO: 13476 - DNA, 122 bp, Homo sapiens
  misc_feature (61)..(62): /note="This region represents a CpG dinucleotide"
  misc_feature (61)..(61): /note="Nucleotide may be methylated to form 5-methylcytosine"
gaatgaaaggtccttggtcttttggtttttgttgtgttcatttcacagcagatcagtgagcgtgtccttactgcctggccccagttcaagtcctggtgttagtgcttcggctttgaagtcag

SEQ ID NO: 13477 - DNA, 122 bp, Homo sapiens
  misc_feature (61)..(62): /note="This region represents a CpG dinucleotide"
  misc_feature (61)..(61): /note="Nucleotide may be methylated to form 5-methylcytosine"
ttattattattaattataatccagctgaggctcaatgaatacttactatgtgccagacagcgtggtaagcactataatttgcacagcactgttgagagcgaagctaacaaaagcagaggcta

SEQ ID NO: 13478 - DNA, 122 bp, Homo sapiens
  misc_feature (61)..(62): /note="This region represents a CpG dinucleotide"
  misc_feature (61)..(61): /note="Nucleotide may be methylated to form 5-methylcytosine"
tgaagtggatatttaacaatttcccagttacgtaagtattcacaggtaaactggctaatgcgagacagaagagctttagtttgtactgaattataaactggttacactagtcaggagaactg

SEQ ID NO: 13479 - DNA, 122 bp, Homo sapiens
  misc_feature (61)..(62): /note="This region represents a CpG dinucleotide"
  misc_feature (61)..(61): /note="Nucleotide may be methylated to form 5-methylcytosine"
actagcttttattcattcattcaatcaatcatttgttcaatacttattgagtacctgctgcgtgttaagcactgagccaagcagtcagcatacaaggaaacaagtataatgttcttgtcttc

SEQ ID NO: 13480 - DNA, 122 bp, Homo sapiens
  misc_feature (61)..(62): /note="This region represents a CpG dinucleotide"
  misc_feature (61)..(61): /note="Nucleotide may be methylated to form 5-methylcytosine"
acgtggtgcaaaagacaggcatgtgggctctgctgccttctagctgggcgaccttgggcacgtcatttaaccctcctatgcctgagtttcttcatccgaaaatcagggcttctgtgaagatt

SEQ ID NO: 13481 - DNA, 122 bp, Homo sapiens
  misc_feature (61)..(62): /note="This region represents a CpG dinucleotide"
  misc_feature (61)..(61): /note="Nucleotide may be methylated to form 5-methylcytosine"
gacagcaacagcaaaaccttcctttggccctcattcacaatacagtgttctgggaggaggcggctgaccagctgactgcagtgatgaagaaaggagtgtcccacaggactctgattcagcag

SEQ ID NO: 13482 - DNA, 122 bp, Homo sapiens
  misc_feature (61)..(62): /note="This region represents a CpG dinucleotide"
  misc_feature (61)..(61): /note="Nucleotide may be methylated to form 5-methylcytosine"
tatgatagaactaacactttgtgagtcatctgggatcctccctgcagagactgagtctctcgctacctgcctgctccctttccccacccattcaacttcattcatctttcaagtttcacagc

SEQ ID NO: 13483 - DNA, 122 bp, Homo sapiens
  misc_feature (61)..(62): /note="This region represents a CpG dinucleotide"
  misc_feature (61)..(61): /note="Nucleotide may be methylated to form 5-methylcytosine"
atggatcacttaatcataaggcaacgctctcctgtgggaagaatttgggaagaaaagccacgcctgtttggggcacatacagtgtgtttatagtttggtgtgatgatctttcttttctcatt

SEQ ID NO: 13484 - DNA, 122 bp, Homo sapiens
  misc_feature (61)..(62): /note="This region represents a CpG dinucleotide"
  misc_feature (61)..(61): /note="Nucleotide may be methylated to form 5-methylcytosine"
ctctcacctggttcaccaaaggaacaagtaggataaagcctgatgcagcttgcagggtgacgatggattgggataatgacccttatatagcttatagtgattatagtgaatgaggtgattca

SEQ ID NO: 13485 - DNA, 122 bp, Homo sapiens
  misc_feature (61)..(62): /note="This region represents a CpG dinucleotide"
  misc_feature (61)..(61): /note="Nucleotide may be methylated to form 5-methylcytosine"
aagggaacaacactgactgagtcagagctagactcaaagctagagtctactggctgatgtcgtgggagaggaagaagagatgagcgggccttgaattcgtttaacattcagcaaaaatgtat

SEQ ID NO: 13486 - DNA, 122 bp, Homo sapiens
  misc_feature (61)..(62): /note="This region represents a CpG dinucleotide"
  misc_feature (61)..(61): /note="Nucleotide may be methylated to form 5-methylcytosine"
tgatgttatccgacatccctttcaaacattctattaaaaacctcaagctacacgagtgcacgtggtttaaagagagggtaaaggaaaggggaaaaaacacattttaggagaaagaggtaaaa

SEQ ID NO: 13487 - DNA, 122 bp, Homo sapiens
  misc_feature (61)..(62): /note="This region represents a CpG dinucleotide"
  misc_feature (61)..(61): /note="Nucleotide may be methylated to form 5-methylcytosine"
ggatgaaggctggcccggcgctgagatttaagcagaaacaggcaagagcagaaccctgaccgccaggcattcaggccccgcccacagacgccggagctacaaatgaggggtgggcgggggga

SEQ ID NO: 13488 - DNA, 122 bp, Homo sapiens
  misc_feature (61)..(62): /note="This region represents a CpG dinucleotide"
  misc_feature (61)..(61): /note="Nucleotide may be methylated to form 5-methylcytosine"
acccgtcagaaccgcattccttttgatggctgaataatagtccattgtctggagagaccacgctttgtttattcattcatctgttgatggctacttgggttgtttccattttttggatattg

SEQ ID NO: 13489 - DNA, 122 bp, Homo sapiens
  misc_feature (61)..(62): /note="This region represents a CpG dinucleotide"
  misc_feature (61)..(61): /note="Nucleotide may be methylated to form 5-methylcytosine"
cagttcacagtagcgttcacagtcctatgagactaatgccaccactcatctgacaggaagcggagctcaggcagtaatgagagcaatggggagtggctgtagatacagacgaagcttcactt

SEQ ID NO: 13490 - DNA, 122 bp, Homo sapiens
  misc_feature (61)..(62): /note="This region represents a CpG dinucleotide"
  misc_feature (61)..(61): /note="Nucleotide may be methylated to form 5-methylcytosine"
ctggcgtgctctcacctgccccacaacagccacctcaccctccaagcaggcctgcagctgcgcaggagttctagacaccatgcctcagtcctcccacaggccaagagggaaaaattacaaag

SEQ ID NO: 13491 - DNA, 122 bp, Homo sapiens
  misc_feature (61)..(62): /note="This region represents a CpG dinucleotide"
  misc_feature (61)..(61): /note="Nucleotide may be methylated to form 5-methylcytosine"
aatctgcattttaagatgatcaccatgtgagtcatatgcccattgggagttgggattggccgaagattctcagtgagaccaggaagttcctgcccctcttgctctggatagtctaacttctc

SEQ ID NO: 13492 - DNA, 122 bp, Homo sapiens
  misc_feature (61)..(62): /note="This region represents a CpG dinucleotide"
  misc_feature (61)..(61): /note="Nucleotide may be methylated to form 5-methylcytosine"
gccatcttgcattggcactgaggtgtttggtttggaatagggaaaaaggtaagagactaacgtggaaaggtgctaactcagagactggagattatagtttacagctgtactttccagatctt

SEQ ID NO: 13493 - DNA, 122 bp, Homo sapiens
  misc_feature (61)..(62): /note="This region represents a CpG dinucleotide"
  misc_feature (61)..(61): /note="Nucleotide may be methylated to form 5-methylcytosine"
tgccaaaatgcatgagaacagctccggaaatcccatctgtttcatatttacagaacttctcgttccttcagtctgggcacaactgactcacttttcattgtgttcctatggcagagtgtctt

SEQ ID NO: 13494 - DNA, 122 bp, Homo sapiens
  misc_feature (61)..(62): /note="This region represents a CpG dinucleotide"
  misc_feature (61)..(61): /note="Nucleotide may be methylated to form 5-methylcytosine"
ccacttccttgggtatcctggtagtctctagaaacacctgggtgagctcactgccagcagcggctaccttgttacacctgttctggcagaggctcaatcatgagcagcaagggccagaccca

SEQ ID NO: 13495 - DNA, 122 bp, Homo sapiens
  misc_feature (61)..(62): /note="This region represents a CpG dinucleotide"
  misc_feature (61)..(61): /note="Nucleotide may be methylated to form 5-methylcytosine"
caccagcaaattcagtgtctggtgaggtcatgcttcctggttcacagatggctttctcaccgtgtcctcacatggcccaagagacaaaggaactctcctccccattgtctctctctggtctt

SEQ ID NO: 13496 - DNA, 122 bp, Homo sapiens
  misc_feature (61)..(62): /note="This region represents a CpG dinucleotide"
  misc_feature (61)..(61): /note="Nucleotide may be methylated to form 5-methylcytosine"
aaatttcaggaccctctaaatttggcctctaagcaagccaaacttctcttaataatgacacgttactggggagaacataagaaaataattttggttagattggacccaataaagaatatctg

SEQ ID NO: 13497 - DNA, 122 bp, Homo sapiens
  misc_feature (61)..(62): /note="This region represents a CpG dinucleotide"
  misc_feature (61)..(61): /note="Nucleotide may be methylated to form 5-methylcytosine"
agtctcataaactagggtcagagtaggtgaactcctaccatgtcccgaagccactgctctcgttcaattcgctccttcctccacctggcttctgactcatcaagctgttcttcagtctgatc

SEQ ID NO: 13498 - DNA, 122 bp, Homo sapiens
  misc_feature (61)..(62): /note="This region represents a CpG dinucleotide"
  misc_feature (61)..(61): /note="Nucleotide may be methylated to form 5-methylcytosine"
gggagcaagagagagaggaggaagtgccaggctcttttgaacaaacagctcaacaaccagcgtgaactcatagaatgagaacttactcatactgtgagggtggcaccaaacaattcatgagg

SEQ ID NO: 13499 - DNA, 122 bp, Homo sapiens
  misc_feature (61)..(62): /note="This region represents a CpG dinucleotide"
  misc_feature (61)..(61): /note="Nucleotide may be methylated to form 5-methylcytosine"
gatgatggtggctggaacacagttcccatcagcaaaggtagccgccccattgacacctcacgactcaccaagatcaccaaggtaggggtgtgtgtgggagtgggtgattcagctcaggttta

SEQ ID NO: 13500 - DNA, 122 bp, Homo sapiens
  misc_feature (61)..(62): /note="This region represents a CpG dinucleotide"
  misc_feature (61)..(61): /note="Nucleotide may be methylated to form 5-methylcytosine"
agtggtgactcaggcttccccacctcagcttctcagtcaagagatccttcaagccttcagcgccaccctcctctctgccttggatgtgggaggggtgctgtccacctgcggtgctgtcttcc

SEQ ID NO: 13501 - DNA, 122 bp, Homo sapiens
  misc_feature (61)..(62): /note="This region represents a CpG dinucleotide"
  misc_feature (61)..(61): /note="Nucleotide may be methylated to form 5-methylcytosine"
ttctgctctgcaggacaagattaccattaactaccatcatgacttcagaagatgctgtcacgatgaaattcatttctgctgcctaaccccataataaggctggctgttctctttaagtaaaa

SEQ ID NO: 13502 - DNA, 122 bp, Homo sapiens
  misc_feature (61)..(62): /note="This region represents a CpG dinucleotide"
  misc_feature (61)..(61): /note="Nucleotide may be methylated to form 5-methylcytosine"
tcaagggagactctaccaggagtgggcagattagagagtaggagaggcagctctagaagacggatctctccagggtcgtggtgacccctcagatggggaactcactgaatccattcctttgg

SEQ ID NO: 13503 - DNA, 122 bp, Homo sapiens
  misc_feature (61)..(62): /note="This region represents a CpG dinucleotide"
  misc_feature (61)..(61): /note="Nucleotide may be methylated to form 5-methylcytosine"
gatttgcttttgaaaacatatcctgaaccctcaggtcaggtacagctgtcagtgtcgtggcgtctcctgggtggttccatgctcttttcagcagcccagcacactgggccagagacaggcaa

SEQ ID NO: 13504 - DNA, 122 bp, Homo sapiens
  misc_feature (61)..(62): /note="This region represents a CpG dinucleotide"
  misc_feature (61)..(61): /note="Nucleotide may be methylated to form 5-methylcytosine"
caagtaatcctcccacctcggcctaacaaagtgttgggactacaggcgtaagccaccgtgcgtggccctcattagggttttgggactagagctacaaagccactgaagtaaggtggcatgac

SEQ ID NO: 13505 - DNA, 122 bp, Homo sapiens
  misc_feature (61)..(62): /note="This region represents a CpG dinucleotide"
  misc_feature (61)..(61): /note="Nucleotide may be methylated to form 5-methylcytosine"
taggtacttgcagggtaggaaaaagttactctgagtgaatcttctaattcactgactcttcgccatagcttttgcagagtatgcccaagagatgagtcagaaccagaagacgtctggctttc

SEQ ID NO: 13506 - DNA, 122 bp, Homo sapiens
  misc_feature (61)..(62): /note="This region represents a CpG dinucleotide"
  misc_feature (61)..(61): /note="Nucleotide may be methylated to form 5-methylcytosine"
tcccaaagtgctgggattacaggcgtgagccaccgtgcccagctggtttattttcaaacacgtatttataaggtgacctatgaagttgaagttgtgcagcctttctctagttatataaggct

SEQ ID NO: 13507 - DNA, 122 bp, Homo sapiens
  misc_feature (61)..(62): /note="This region represents a CpG dinucleotide"
  misc_feature (61)..(61): /note="Nucleotide may be methylated to form 5-methylcytosine"
caattagcaatatcaaacttttgcttctgttcaggtctgtccaaggtatggggacatttccgaagtcaggagaattaaaaaaaaaaaaaaaaagccagagtttggctgctcagcatcagtgc

SEQ ID NO: 13508 - DNA, 122 bp, Homo sapiens
  misc_feature (61)..(62): /note="This region represents a CpG dinucleotide"
  misc_feature (61)..(61): /note="Nucleotide may be methylated to form 5-methylcytosine"
agggtcgcggcacgctggaaagcagtttggtgatgtcacatcaagtcagcagatgtcttacgtcccagcgatcccacgcgcgacagtcatggaaacacaggtgcacagaaagagctgcacaa

SEQ ID NO: 13509 - DNA, 122 bp, Homo sapiens
  misc_feature (61)..(62): /note="This region represents a CpG dinucleotide"
  misc_feature (61)..(61): /note="Nucleotide may be methylated to form 5-methylcytosine"
tttatgtgcaaatctacacgtccctttctctactggggaagaacagagataaggagcggacgtgctcaaagggtgagtcaatgggatcttaggccaggagcctattgttttcccatttgggc

SEQ ID NO: 13510 - DNA, 122 bp, Homo sapiens
  misc_feature (61)..(62): /note="This region represents a CpG dinucleotide"
  misc_feature (61)..(61): /note="Nucleotide may be methylated to form 5-methylcytosine"
tcatcttccttctcctgcaagagtactgtagtcttgttttccaagtctttttcccatctacgtacagacactgctgtatgtgtgtattgaaaggtgtggttgatttggaattgaataaacct

SEQ ID NO: 13511 - DNA, 122 bp, Homo sapiens
  misc_feature (61)..(62): /note="This region represents a CpG dinucleotide"
  misc_feature (61)..(61): /note="Nucleotide may be methylated to form 5-methylcytosine"
ttatagaaaggttagaaaagagcatgtctcaggggattcctacgaccatgccaatcatgacgaaacatgctaaacaagctgggggatgctcccaagagtgtccttgattcttgtttaaggtc

SEQ ID NO: 13512 - DNA, 122 bp, Homo sapiens
  misc_feature (61)..(62): /note="This region represents a CpG dinucleotide"
  misc_feature (61)..(61): /note="Nucleotide may be methylated to form 5-methylcytosine"
gattgcccttggtaacattataaagaagatgacaggtggctctgcaaagaactgtccagacgggggagctggactgagccacagttaagagactgttgcagtagactagactaggaggagga

SEQ ID NO: 13513 - DNA, 122 bp, Homo sapiens
  misc_feature (61)..(62): /note="This region represents a CpG dinucleotide"
  misc_feature (61)..(61): /note="Nucleotide may be methylated to form 5-methylcytosine"
attcacatcttcgaggctcgtctgtaagatggggataattcttccttcactggcttgttacgagtatgaatgtagaaaccactgtgaaagtgtaatattagcagcatcagatagaaaaaaga

SEQ ID NO: 13514 - DNA, 122 bp, Homo sapiens
  misc_feature (61)..(62): /note="This region represents a CpG dinucleotide"
  misc_feature (61)..(61): /note="Nucleotide may be methylated to form 5-methylcytosine"
tgtccttcattcatggtaaaagccctaatagcctcagtgttagaatatcctgtaggcaggcgaaggatgacatgactcactttggtggtgacctcctagtagttcaactgagaatccaggcg

SEQ ID NO: 13515 - DNA, 122 bp, Homo sapiens
  misc_feature (61)..(62): /note="This region represents a CpG dinucleotide"
  misc_feature (61)..(61): /note="Nucleotide may be methylated to form 5-methylcytosine"
aagttttcagatatgactgaaaaccacactgagctatgaataaaactgctgctctataatcggaaacctatctgcaaaacttgacagccaccaccccatgatcaggaaacaaccaccaaatt

SEQ ID NO: 13516 - DNA, 122 bp, Homo sapiens
  misc_feature (61)..(62): /note="This region represents a CpG dinucleotide"
  misc_feature (61)..(61): /note="Nucleotide may be methylated to form 5-methylcytosine"
gaccaatgtagtagtaaaaattggaaaagattttcaataaatattatgacaatgaatgcacgtgtgtttacgtgtatatgtacaagttaaagttaccaaagatgattataggtcagcaatga

SEQ ID NO: 13517 - DNA, 122 bp, Homo sapiens
  misc_feature (61)..(62): /note="This region represents a CpG dinucleotide"
  misc_feature (61)..(61): /note="Nucleotide may be methylated to form 5-methylcytosine"
cacataatattgttgaaaagccaagtctgcattgctcttaaacccagccttatggatgaacgcggaggagtgcaaaaggcagaatgagctcatttgggagaggcagctggtcagagagtcct

SEQ ID NO: 13518 - DNA, 122 bp, Homo sapiens
  misc_feature (61)..(62): /note="This region represents a CpG dinucleotide"
  misc_feature (61)..(61): /note="Nucleotide may be methylated to form 5-methylcytosine"
tctgcctgtcttcagtgtcccagtctctacacaagctcagctaagggtggtgccatctcacgggagcattccctcataaccatcactggcttggggaatggagctggcaaatcaaattgtca

SEQ ID NO: 13519 - DNA, 122 bp, Homo sapiens
  misc_feature (61)..(62): /note="This region represents a CpG dinucleotide"
  misc_feature (61)..(61): /note="Nucleotide may be methylated to form 5-methylcytosine"
tagctatgttagcagcttgaaggcacaacgtaaaaggaatgagctttcacaaggtgcttacgttagctgggtagtattggtcaaaggtactctgaagagtgaatgcagaaatcagttggctg

SEQ ID NO: 13520 - DNA, 122 bp, Homo sapiens
  misc_feature (61)..(62): /note="This region represents a CpG dinucleotide"
  misc_feature (61)..(61): /note="Nucleotide may be methylated to form 5-methylcytosine"
agacccctgggtgcagggtcatgagttttccttggatctagagtctgcaccaaacagtgccgtaaggtctatagttgttaattccctctgacttatggagatgtcgctcttcctagtatcag

SEQ ID NO: 13521 - DNA, 122 bp, Homo sapiens
  misc_feature (61)..(62): /note="This region represents a CpG dinucleotide"
  misc_feature (61)..(61): /note="Nucleotide may be methylated to form 5-methylcytosine"
ctttttatttttggcccactgccaaaatttgggtgtgaccaaaactgtcatttgggtggtcgcttaagtgtccttcaaggtgattatctagtcagcccgtgttccacttgaggaaaatgaag

SEQ ID NO: 13522 - DNA, 122 bp, Homo sapiens
  misc_feature (61)..(62): /note="This region represents a CpG dinucleotide"
  misc_feature (61)..(61): /note="Nucleotide may be methylated to form 5-methylcytosine"
ctcagaagaaatcatgcgacacatgactgtgtttctcattcctagaaaggaggcacatgacgagatgattatatcatacagcctaggtgtgttgtaggctataccatctaggtttgtgtaag

SEQ ID NO: 13523 - DNA, 122 bp, Homo sapiens
  misc_feature (61)..(62): /note="This region represents a CpG dinucleotide"
  misc_feature (61)..(61): /note="Nucleotide may be methylated to form 5-methylcytosine"
tttgagcaccatgagcctgagatagacaagcaggaggagtgaaggcacatgtgatgcactcgtagtctgcataggccattgccacccagtatggctggtggaataggaaactaagctgtttg

SEQ ID NO: 13524 - DNA, 122 bp, Homo sapiens
  misc_feature (61)..(62): /note="This region represents a CpG dinucleotide"
  misc_feature (61)..(61): /note="Nucleotide may be methylated to form 5-methylcytosine"
ccttgtttaggcttggattatgtcgctaaggactgtaggaatggcacctggaagaagacacgcaagaggtttgtcaataacttcaaaggatttgccaaggatgaggaagttgcaaaaatcaa

SEQ ID NO: 13525 - DNA, 122 bp, Homo sapiens
  misc_feature (61)..(62): /note="This region represents a CpG dinucleotide"
  misc_feature (61)..(61): /note="Nucleotide may be methylated to form 5-methylcytosine"
ccagggctttcctggacacattgcaatcctaacctcagggtaaaagccatgtccctgttccgccacagcatggcaaaatcaattccagttggattaaaaagttacatgtttttaaaaaaatg

SEQ ID NO: 13526 - DNA, 122 bp, Homo sapiens
  misc_feature (61)..(62): /note="This region represents a CpG dinucleotide"
  misc_feature (61)..(61): /note="Nucleotide may be methylated to form 5-methylcytosine"
tatcactacttttcatcacattttgaagatctgacttattaagtactttgcagtctctcccgtttgaatctgaagtgtagtggtagcagctagcacttgtcatatttcaggtttggtgtagt

SEQ ID NO: 13527 - DNA, 122 bp, Homo sapiens
  misc_feature (61)..(62): /note="This region represents a CpG dinucleotide"
  misc_feature (61)..(61): /note="Nucleotide may be methylated to form 5-methylcytosine"
acattattttaataaggtcagagccatggctttaatctatccatttgtcagttaatgtcacgcaattccatgatcacagaccagactagtcccaggcaattgtctcagaaatgactataagt

SEQ ID NO: 13528 - DNA, 122 bp, Homo sapiens
  misc_feature (61)..(62): /note="This region represents a CpG dinucleotide"
  misc_feature (61)..(61): /note="Nucleotide may be methylated to form 5-methylcytosine"
gactgctcagacaagcactgcctgagccagtaaagtctagcaagctgtgagctctgcttacgccaggagggtgggactggcaagcctttcctttggcaaaactcagaggcctgactcaactg

SEQ ID NO: 13529 - DNA, 122 bp, Homo sapiens
  misc_feature (61)..(62): /note="This region represents a CpG dinucleotide"
  misc_feature (61)..(61): /note="Nucleotide may be methylated to form 5-methylcytosine"
tgctccagcctggaagtgaagtctcatccgctcacaggtcgttagctacagctcctcacacgttcctgggaaacacagggaagcagaaagtgtggtcctaccatgaacctagaggtctggaa

SEQ ID NO: 13530 - DNA, 122 bp, Homo sapiens
  misc_feature (61)..(62): /note="This region represents a CpG dinucleotide"
  misc_feature (61)..(61): /note="Nucleotide may be methylated to form 5-methylcytosine"
tgctgcctatttcacatagctgttgttgagtctccagtacaataaggaattcaggctgggcgcagtggctcacgcctgtaatcccagcactttgggaggctgaggcgggtgaatcacctgag

SEQ ID NO: 13531 - DNA, 122 bp, Homo sapiens
  misc_feature (61)..(62): /note="This region represents a CpG dinucleotide"
  misc_feature (61)..(61): /note="Nucleotide may be methylated to form 5-methylcytosine"
tcaagaactggccctctctgccttaaatccagccaggctacctcatgcataaaacattaacgcagaatgggaccatgtaaaactacacagcagaatcaggagtcctgcctctgacactcacc

SEQ ID NO: 13532 - DNA, 122 bp, Homo sapiens
  misc_feature (61)..(62): /note="This region represents a CpG dinucleotide"
  misc_feature (61)..(61): /note="Nucleotide may be methylated to form 5-methylcytosine"
atttaaccaacacgaatagggcaagggatttttggcatccaactcatcttccctgatcatcgtgtagctgctctctttgcttttcaaatctcagggccgggcacagtggctcacacctgtaa

SEQ ID NO: 13533 - DNA, 122 bp, Homo sapiens
  misc_feature (61)..(62): /note="This region represents a CpG dinucleotide"
  misc_feature (61)..(61): /note="Nucleotide may be methylated to form 5-methylcytosine"
aagactccacacatgggttacctccagtggtttcttaaatcctccaagtaaatcactgtccgctctggattcccacagcaaataagtcataaaaaactttacatgctttttaaaattgatta

SEQ ID NO: 13534 - DNA, 122 bp, Homo sapiens
  misc_feature (61)..(62): /note="This region represents a CpG dinucleotide"
  misc_feature (61)..(61): /note="Nucleotide may be methylated to form 5-methylcytosine"
gctcgccttgttttatataggaagaaactaagactcagacatgttgggtaacattctaaacgtcacacagctagcaaatggcagtgccaggagtcaaggccaggtccatggatgttacaata

SEQ ID NO: 13535 - DNA, 122 bp, Homo sapiens
  misc_feature (61)..(62): /note="This region represents a CpG dinucleotide"
  misc_feature (61)..(61): /note="Nucleotide may be methylated to form 5-methylcytosine"
tcttcccaaatacctgaggcttttcacctttcatggggatctggctaatgcacagctgttcgtttggaagagggtattgcaatgactgaactccagggcttaatctccacacttgcctaagt

SEQ ID NO: 13536 - DNA, 122 bp, Homo sapiens
  misc_feature (61)..(62): /note="This region represents a CpG dinucleotide"
  misc_feature (61)..(61): /note="Nucleotide may be methylated to form 5-methylcytosine"
cagggagaggatttaatgtgaggccaggtgtctacactgtccctggggcagggtaactcccgtaacactcacccttttaagcccacttccctgtgttagtgtgttgagctccttggctcagg

SEQ ID NO: 13537 - DNA, 122 bp, Homo sapiens
  misc_feature (61)..(62): /note="This region represents a CpG dinucleotide"
  misc_feature (61)..(61): /note="Nucleotide may be methylated to form 5-methylcytosine"
aaagctgccaagcagagacagcctctcctgcccctttcccagggctgactcagcaccttacgcgtgaggatttgtcatcaacaactgaccccaaaagccatggtgccctggggttggtgtcc

SEQ ID NO: 13538 - DNA, 122 bp, Homo sapiens
  misc_feature (61)..(62): /note="This region represents a CpG dinucleotide"
  misc_feature (61)..(61): /note="Nucleotide may be methylated to form 5-methylcytosine"
agctccacacttaggtatgcctctgggcatttagtggctgccaggtagattctccctcagcgctggtgtccacacctgccactgggggatctgtaggcagatctgcccagtctcgtcctgcc

SEQ ID NO: 13539 - DNA, 122 bp, Homo sapiens
  misc_feature (61)..(62): /note="This region represents a CpG dinucleotide"
  misc_feature (61)..(61): /note="Nucleotide may be methylated to form 5-methylcytosine"
gcgcacagatttggtataatcatttaaattcaacttcacccagtgaagataataactagtcggtagttaacatcatcttaaagatgaatgagctgatgtgctagggtgaggttaccattaag

SEQ ID NO: 13540 - DNA, 122 bp, Homo sapiens
  misc_feature (61)..(62): /note="This region represents a CpG dinucleotide"
  misc_feature (61)..(61): /note="Nucleotide may be methylated to form 5-methylcytosine"
ggcagtctgctcattgctagaaagggtgggtgtggtgtaattgtgcaaagtataatgtggcgtaatctgcttagtgttctatgcggattattctgtgataggatcttgacaattacttgctt

SEQ ID NO: 13541 - DNA, 122 bp, Homo sapiens
  misc_feature (61)..(62): /note="This region represents a CpG dinucleotide"
  misc_feature (61)..(61): /note="Nucleotide may be methylated to form 5-methylcytosine"
agattatgatagagctgaaaaattcctgtcacctaattgaggttgtagtcatcgtagcatcgtcagacagtgcattactcacatgtttgtggtgatgctggtggaaacaaacttgtgctgcc

SEQ ID NO: 13542 - DNA, 122 bp, Homo sapiens
  misc_feature (61)..(62): /note="This region represents a CpG dinucleotide"
  misc_feature (61)..(61): /note="Nucleotide may be methylated to form 5-methylcytosine"
cacaggttttcttttttcctgatgtgggacaccactaaccctcttgtgctcagaggtcaccgtcagtatctcctcactcccagataaaatcaatgcgcaaactattttattcagacggcaaa

SEQ ID NO: 13543 - DNA, 122 bp, Homo sapiens
  misc_feature (61)..(62): /note="This region represents a CpG dinucleotide"
  misc_feature (61)..(61): /note="Nucleotide may be methylated to form 5-methylcytosine"
ccacctgcagaggcacaattgcccagcgtggggtggaaggcaggctgggagctcccgggacgcggcgtggcagcgcagggctcggctagatgcgctcctcctcggactggttgagtaaggga

SEQ ID NO: 13544 - DNA, 122 bp, Homo sapiens
  misc_feature (61)..(62): /note="This region represents a CpG dinucleotide"
  misc_feature (61)..(61): /note="Nucleotide may be methylated to form 5-methylcytosine"
aactgaacaaggttgcagggtacacaacaaatacacaaaaaaaattaattgcatttaggccgggtgtggtggctcacgcctgtaatcccagcattttgggaggccgaggtgggcagatcacg

SEQ ID NO: 13545 - DNA, 122 bp, Homo sapiens
  misc_feature (61)..(62): /note="This region represents a CpG dinucleotide"
  misc_feature (61)..(61): /note="Nucleotide may be methylated to form 5-methylcytosine"
acctacttatgggacattttcaagttctacttatagatcttgtagttcagggagcagtggcgtctcatgtattcagcacaatgtggagttatgctgttgtttaatgtggcttaggccttctg

SEQ ID NO: 13546 - DNA, 122 bp, Homo sapiens
  misc_feature (61)..(62): /note="This region represents a CpG dinucleotide"
  misc_feature (61)..(61): /note="Nucleotide may be methylated to form 5-methylcytosine"
gtgtcttctttcatccccaggccatgtgcaatcactataatctgggaactgacaggtcagcgactagaaccaagtttcagctaagccacaaccagttgcaaacccaggataatgttgaactg

SEQ ID NO: 13547 - DNA, 122 bp, Homo sapiens
  misc_feature (61)..(62): /note="This region represents a CpG dinucleotide"
  misc_feature (61)..(61): /note="Nucleotide may be methylated to form 5-methylcytosine"
tggttaagaaagaaaccctataaccagagttgaattcccttggtgaacgctacccaaaggcgtgcttcagggaggtgtaaccacagctatgtctgatatttaaactagccacgcattgctaa

SEQ ID NO: 13548 - DNA, 122 bp, Homo sapiens
  misc_feature (61)..(62): /note="This region represents a CpG dinucleotide"
  misc_feature (61)..(61): /note="Nucleotide may be methylated to form 5-methylcytosine"
gtgaaaacccagctgtctgcgctgatacccctgggaggagcctttgctgcagcaactccccgccctcattaagtctccaccccaggctgcaccgtcaggtaaacctgggagccacgggattc

SEQ ID NO: 13549 - DNA, 122 bp, Homo sapiens
  misc_feature (61)..(62): /note="This region represents a CpG dinucleotide"
  misc_feature (61)..(61): /note="Nucleotide may be methylated to form 5-methylcytosine"
tccttgcccattcagctgaagccacatggtctattctttgttccttgaatacactacacacgccattgcctggggcctttgtgcttgctcttccaggaaggctcttcacacagctatccaca

SEQ ID NO: 13550 - DNA, 122 bp, Homo sapiens
  misc_feature (61)..(62): /note="This region represents a CpG dinucleotide"
  misc_feature (61)..(61): /note="Nucleotide may be methylated to form 5-methylcytosine"
tagcataatcatcctatccatatagtattccagcaaattgcaatgactcatccaggcctccgctgagtttcctaagctcttgacaactttaagcacagaaacaagcccttcaaaacgccctg

SEQ ID NO: 13551 - DNA, 122 bp, Homo sapiens
  misc_feature (61)..(62): /note="This region represents a CpG dinucleotide"
  misc_feature (61)..(61): /note="Nucleotide may be methylated to form 5-methylcytosine"
ctagagactctgaaaacctgcatggggcacacatctagcaagagatttgctcaattcatccgtctcccggctcccccaactttgggcaactcttaccaacacattatttttcttctgagtta

SEQ ID NO: 13552 - DNA, 122 bp, Homo sapiens
  misc_feature (61)..(62): /note="This region represents a CpG dinucleotide"
  misc_feature (61)..(61): /note="Nucleotide may be methylated to form 5-methylcytosine"
aaaagccacatactgaaatcaccagagtcagcaaatccatacagacagagagcacattagcggttgacaagcgctcgggagggaggaccagggagtgactgcttaatgcttatgacatttcc

SEQ ID NO: 13553 - DNA, 122 bp, Homo sapiens
  misc_feature (61)..(62): /note="This region represents a CpG dinucleotide"
  misc_feature (61)..(61): /note="Nucleotide may be methylated to form 5-methylcytosine"
ttgtcatcttcttataaggacaccagtcatactggattacgactcatcctaatgaactcacgttaacttgattatatatacagacttgatttccaaataaggccacatttacgtggactggg

SEQ ID NO: 13554 - DNA, 122 bp, Homo sapiens
  misc_feature (61)..(62): /note="This region represents a CpG dinucleotide"
  misc_feature (61)..(61): /note="Nucleotide may be methylated to form 5-methylcytosine"
aacaccctgtggctccgtgggtgaaggcggtgctggctccttccctgtgtgtggatcagccgtgcctgggactcaggtcgggttgggtcaggctgtgtcgggctagggagcccagtctcccc

SEQ ID NO: 13555 - DNA, 122 bp, Homo sapiens
  misc_feature (61)..(62): /note="This region represents a CpG dinucleotide"
  misc_feature (61)..(61): /note="Nucleotide may be methylated to form 5-methylcytosine"
ttctggaggcttagttacgcaattgccggctctgtcatcttctacagggatgtgaccttacggaaaagtaaggaatctgaagcgtggcagatcactttgaagcttgcccagtttttgcatgt

SEQ ID NO: 13556 - DNA, 122 bp, Homo sapiens
  misc_feature (61)..(62): /note="This region represents a CpG dinucleotide"
  misc_feature (61)..(61): /note="Nucleotide may be methylated to form 5-methylcytosine"
cctgtccacacggttggctttgtaagccggattgttctccccaaatgtgtggctcagccacgtctcaaagtcatgaggcttgaatgaagattcagcatatgaaggaggatgtatggagacag

SEQ ID NO: 13557 - DNA, 122 bp, Homo sapiens
  misc_feature (61)..(62): /note="This region represents a CpG dinucleotide"
  misc_feature (61)..(61): /note="Nucleotide may be methylated to form 5-methylcytosine"
ttagactctagcctgctccattcacttagccattaataataatgactaacacttaacaagcgctaccacataccaggcattaagagattcatatcattatgaagttattatcattatttcca

SEQ ID NO: 13558 - DNA, 122 bp, Homo sapiens
  misc_feature (61)..(62): /note="This region represents a CpG dinucleotide"
  misc_feature (61)..(61): /note="Nucleotide may be methylated to form 5-methylcytosine"
ttgggcgaaggaaggaacgggacagcagtgagacgggcgtgtgctgtctagtcccagcgtcggaagcacttggtgggaaaccgctgccaactctgctcctgtaatcacagggttcacctgca

SEQ ID NO: 13559 - DNA, 122 bp, Homo sapiens
  misc_feature (61)..(62): /note="This region represents a CpG dinucleotide"
  misc_feature (61)..(61): /note="Nucleotide may be methylated to form 5-methylcytosine"
tctggacctctcgtttagaccttctctcctgactgccagatggcatgtcccactgtcctccggtgtacatctccaaattgtcccacaggcatttatctcagatgaagtttcaggttggactc

SEQ ID NO: 13560 - DNA, 122 bp, Homo sapiens
  misc_feature (61)..(62): /note="This region represents a CpG dinucleotide"
  misc_feature (61)..(61): /note="Nucleotide may be methylated to form 5-methylcytosine"
ctcaaatgtgtagagtcagcaacaattccgtagcttccaactgactcagaattgatgcaacgtaggtcttctggcccgaggcaggtatcaagtccaaatcataatgaacttttcaccagttt

SEQ ID NO: 13561 - DNA, 122 bp, Homo sapiens
  misc_feature (61)..(62): /note="This region represents a CpG dinucleotide"
  misc_feature (61)..(61): /note="Nucleotide may be methylated to form 5-methylcytosine"
gacagtgtacacccaggattttgttctcagtctgatagtcatctgaaatgaccaatgatgcgggaagtaccctttccagatgctggctcagccagggccgagtgacctgttgcagagtccat

SEQ ID NO: 13562 - DNA, 122 bp, Homo sapiens
  misc_feature (61)..(62): /note="This region represents a CpG dinucleotide"
  misc_feature (61)..(61): /note="Nucleotide may be methylated to form 5-methylcytosine"
cttaagtgatccgcctgcctaagcttcccaaagtgctaggattataggcgtgagccaccgcgcccagctagtgctgttcttaaggttagttgtgactcagagtcctcttggggaaagccaga

SEQ ID NO: 13563 - DNA, 122 bp, Homo sapiens
  misc_feature (61)..(62): /note="This region represents a CpG dinucleotide"
  misc_feature (61)..(61): /note="Nucleotide may be methylated to form 5-methylcytosine"
ctaagcaaccaaaaattgagattcctgtgtatcaaaaatgccaaccttctcttcagactccgtatacttcctaagccatgtcactgtatcaggtgtcagggctctcgtgcccagcaaatgcc

SEQ ID NO: 13564 - DNA, 122 bp, Homo sapiens
  misc_feature (61)..(62): /note="This region represents a CpG dinucleotide"
  misc_feature (61)..(61): /note="Nucleotide may be methylated to form 5-methylcytosine"
actctcctcattttgcagatgaggagcccaaggtgaaatggccactcagggagtgagtgccggcttcctcagggaagagcgcctggctgggactagacaccagtgctgggaggtgggggtga

SEQ ID NO: 13565 - DNA, 122 bp, Homo sapiens
  misc_feature (61)..(62): /note="This region represents a CpG dinucleotide"
  misc_feature (61)..(61): /note="Nucleotide may be methylated to form 5-methylcytosine"
agtcaagggcaaaagcttgtgactcagcaacactaccagttaaagagctatcctgtattacgcacttactgtatgccaggtgccacactcaggccttggctttcattactttaattaaccct

SEQ ID NO: 13566 - DNA, 122 bp, Homo sapiens
  misc_feature (61)..(62): /note="This region represents a CpG dinucleotide"
  misc_feature (61)..(61): /note="Nucleotide may be methylated to form 5-methylcytosine"
atacactgaaaccagctcaggcagaacaaaggaacaaagacaaatttcccaggttgcagccggcagtcagaagccagaagccaccaaatagctccctgggttgcttttatgcactcaacctg

SEQ ID NO: 13567 - DNA, 122 bp, Homo sapiens
  misc_feature (61)..(62): /note="This region represents a CpG dinucleotide"
  misc_feature (61)..(61): /note="Nucleotide may be methylated to form 5-methylcytosine"
agttaaatataatcaaggaatttccctgtctttgctatttgagattgtgaccacaacaggcggttggctgaaagggaaactgaagggcggggagggagggaaatagatgaaaaaacaaaaca

SEQ ID NO: 13568 - DNA, 122 bp, Homo sapiens
  misc_feature (61)..(62): /note="This region represents a CpG dinucleotide"
  misc_feature (61)..(61): /note="Nucleotide may be methylated to form 5-methylcytosine"
tgaaatggtatgacaactcttgtggaaaattaggattcttaatggatttcttagctgagacgcctcaactttgccctgaaacagcgtcagcaccctggttttagatccaaatgttacttcca

SEQ ID NO: 13569 - DNA, 122 bp, Homo sapiens
  misc_feature (61)..(62): /note="This region represents a CpG dinucleotide"
  misc_feature (61)..(61): /note="Nucleotide may be methylated to form 5-methylcytosine"
gggtgtggtcttcccactggagcatggaaactgcaaagccaccagcttgagggaggggcacgtggttaaggaagcaaagaaaaagctgacatgagaactgtttccaggaacaaaccatgaat

SEQ ID NO: 13570 - DNA, 122 bp, Homo sapiens
  misc_feature (61)..(62): /note="This region represents a CpG dinucleotide"
  misc_feature (61)..(61): /note="Nucleotide may be methylated to form 5-methylcytosine"
atgtaaggagaaacaggaccctcaatcaattaccgtcggctccaaaatggctgactttagcgaacacagcagaagatgctggctcatcagctctgtgttctaagttaatcccaggaaagcac

SEQ ID NO: 13571 - DNA, 122 bp, Homo sapiens
  misc_feature (61)..(62): /note="This region represents a CpG dinucleotide"
  misc_feature (61)..(61): /note="Nucleotide may be methylated to form 5-methylcytosine"
gccctgctaaagacagtgcggatgcaagagcacctggccaagcgagagcagctgggtaagcgccaccagggtggggcttcggggcccaggccacggccagagccacagccttctgtggatgt

SEQ ID NO: 13572 - DNA, 122 bp, Homo sapiens
  misc_feature (61)..(62): /note="This region represents a CpG dinucleotide"
  misc_feature (61)..(61): /note="Nucleotide may be methylated to form 5-methylcytosine"
cagaagagcttcctggggcctcggaaggattactgggactttctctgcactgccctacgacggcagcggggaaacatggagccaatccactttgtccgttcccaggacaaggtatccagggc

SEQ ID NO: 13573 - DNA, 122 bp, Homo sapiens
  misc_feature (61)..(62): /note="This region represents a CpG dinucleotide"
  misc_feature (61)..(61): /note="Nucleotide may be methylated to form 5-methylcytosine"
ccaatttgcatagatgagtacactgaagcattgcaagtattttctcatggcctcaaaggacgtgtgctgttgacagactgcagctgaaaaggaccaattacttaactaatgttttgcagaga

SEQ ID NO: 13574 - DNA, 122 bp, Homo sapiens
  misc_feature (61)..(62): /note="This region represents a CpG dinucleotide"
  misc_feature (61)..(61): /note="Nucleotide may be methylated to form 5-methylcytosine"
gttcacagcagaaagcagaaagctacagccacctgggtggatcaggttaagttcagcaaccgcctaaccctacttgttttagattcagtcctgaggaagggagattagctctattggattag

SEQ ID NO: 13575 - DNA, 122 bp, Homo sapiens
  misc_feature (61)..(62): /note="This region represents a CpG dinucleotide"
  misc_feature (61)..(61): /note="Nucleotide may be methylated to form 5-methylcytosine"
aaagttgagacactccagggtagttactaatcaaaccacaacaacaaaactcaccagactcgccaaacattacaggcgctgcacttgccagtgcgctgattaagaatcactgagaactccac

SEQ ID NO: 13576 - DNA, 122 bp, Homo sapiens
  misc_feature (61)..(62): /note="This region represents a CpG dinucleotide"
  misc_feature (61)..(61): /note="Nucleotide may be methylated to form 5-methylcytosine"
ttagccgggcatggtggtgcattcctgtaatcaatctcagctactcaggaggctgacgtacgagaatcactttagcccagaaggcggtgcttgcaatgagccaagattgagtcactgcactc

SEQ ID NO: 13577 - DNA, 122 bp, Homo sapiens
  misc_feature (61)..(62): /note="This region represents a CpG dinucleotide"
  misc_feature (61)..(61): /note="Nucleotide may be methylated to form 5-methylcytosine"
ctgggaaagtccctgaaagagagcagttgtccatgcctctactatggcaccaccacacctcgcccatgcttttatataatcttgttttcaatgacaccacattccagcaacattagggaatc

SEQ ID NO: 13578 - DNA, 122 bp, Homo sapiens
  misc_feature (61)..(62): /note="This region represents a CpG dinucleotide"
  misc_feature (61)..(61): /note="Nucleotide may be methylated to form 5-methylcytosine"
gggcagactctgccccagagtctgcctgagttcagtgcttcagcctgccacactgagctgcgatgcatggggtgacaaacatcaattagtttaaatgttttctgaattattgcccactttaa

SEQ ID NO: 13579 - DNA, 122 bp, Homo sapiens
  misc_feature (61)..(62): /note="This region represents a CpG dinucleotide"
  misc_feature (61)..(61): /note="Nucleotide may be methylated to form 5-methylcytosine"
aatggttcccagccccagttctcttagcaaggctttctaattcattatctcatttaatctcgccatgagtcaggcagggcagtaacacatgggaaaggagggtgggggtggggatagtgtga

SEQ ID NO: 13580 - DNA, 122 bp, Homo sapiens
  misc_feature (61)..(62): /note="This region represents a CpG dinucleotide"
  misc_feature (61)..(61): /note="Nucleotide may be methylated to form 5-methylcytosine"
tctgcaagttacttcactgccctggcctcaactagtatgtctgtaaaatgaagacactgacgctgaccttgctcatcaggttgttataagaattaaatgaggccaggcacagtggctcatgc

SEQ ID NO: 13581 - DNA, 122 bp, Homo sapiens
  misc_feature (61)..(62): /note="This region represents a CpG dinucleotide"
  misc_feature (61)..(61): /note="Nucleotide may be methylated to form 5-methylcytosine"
agtccctacttgcaggatggtgcattttaacccttcaagtcctacttaacacacctggggcgtgagcatgactttttgcacatctgtaaattagcctcaacctgagtcatttcaacagactc

SEQ ID NO: 13582 - DNA, 122 bp, Homo sapiens
  misc_feature (61)..(62): /note="This region represents a CpG dinucleotide"
  misc_feature (61)..(61): /note="Nucleotide may be methylated to form 5-methylcytosine"
agcctcccacctagaatatctaatctaggccctgggtgatttcctttcatcactgacaaccgcagcaacattagtaatcataatgaacccttacaagcatgattcatatgtacctggcatga

SEQ ID NO: 13583 - DNA, 122 bp, Homo sapiens
  misc_feature (61)..(62): /note="This region represents a CpG dinucleotide"
  misc_feature (61)..(61): /note="Nucleotide may be methylated to form 5-methylcytosine"
atgcactaatatttcacagtgatactggcccatgggaccggtattggaaggaagaccaggcgttccccttgaagggatggccatggctgccttactcacacgcttgctgctgacatgctgca

SEQ ID NO: 13584 - DNA, 122 bp, Homo sapiens
  misc_feature (61)..(62): /note="This region represents a CpG dinucleotide"
  misc_feature (61)..(61): /note="Nucleotide may be methylated to form 5-methylcytosine"
aacctatgtttagctccaggataaggaagccttggaaacaggattgtgtgagtaagagcccggagttaggattcaagtaaactgagcattaatcccacatgtgtcactgtcttgctgtgtga

SEQ ID NO: 13585 - DNA, 122 bp, Homo sapiens
  misc_feature (61)..(62): /note="This region represents a CpG dinucleotide"
  misc_feature (61)..(61): /note="Nucleotide may be methylated to form 5-methylcytosine"
tacaggaattattcagctccattataatcttacaggattactgtcctatatgcagtttgtcgtttactgcaatatcattatacagcacatgactatattgtctatggtaactgggctttatg

SEQ ID NO: 13586 - DNA, 122 bp, Homo sapiens
  misc_feature (61)..(62): /note="This region represents a CpG dinucleotide"
  misc_feature (61)..(61): /note="Nucleotide may be methylated to form 5-methylcytosine"
tgatgttttctggtcggcaatactgtgagtattgtcacacctcataccggtaggaggtagcgctgtccatgactccacagggagaggaaaaccagaaactccacctcgggaccctcccagac

SEQ ID NO: 13587 - DNA, 122 bp, Homo sapiens
  misc_feature (61)..(62): /note="This region represents a CpG dinucleotide"
  misc_feature (61)..(61): /note="Nucleotide may be methylated to form 5-methylcytosine"
ccactgagtcaccggcgctcggggaggggccaggtccactgccagttgaatctggttctgcggtcgcttgctttggggaactcaggcaagcgtcctgaacacttcaaaacctcccaatgatc

SEQ ID NO: 13588 - DNA, 122 bp, Homo sapiens
  misc_feature (61)..(62): /note="This region represents a CpG dinucleotide"
  misc_feature (61)..(61): /note="Nucleotide may be methylated to form 5-methylcytosine"
atggggttggtgaggcagggtgctacctgttttaggtactggggagtttttagtaagacccgccctgcctgagttcaatgaaacacatcttgactcagcactttctgtgtgccaggcgctgt

SEQ ID NO: 13589 - DNA, 122 bp, Homo sapiens
  misc_feature (61)..(62): /note="This region represents a CpG dinucleotide"
  misc_feature (61)..(61): /note="Nucleotide may be methylated to form 5-methylcytosine"
ttgagacgggctctccctatgtttccttggctgattttgaattccagcgctcaagcgatccgcccatcttggcctcccaaagagctgggattacaggcatgagccatgagccactcactcat

SEQ ID NO: 13590 - DNA, 122 bp, Homo sapiens
  misc_feature (61)..(62): /note="This region represents a CpG dinucleotide"
  misc_feature (61)..(61): /note="Nucleotide may be methylated to form 5-methylcytosine"
tactcaccatttgtgcatcctccatgagcttaagaaataaaaccttcaaagtgcaattgacgtctcctatttgcccttccctgagagcactatccttactctctgccataggttaacactat

SEQ ID NO: 13591 - DNA, 122 bp, Homo sapiens
  misc_feature (61)..(62): /note="This region represents a CpG dinucleotide"
  misc_feature (61)..(61): /note="Nucleotide may be methylated to form 5-methylcytosine"
aggatgaataaaatgcagtccctgaccttaagatgcttaatgaagtctggccgggcaccacggctcacacctgtaatcccaacactttaggaggctgaggcaggcagattgcttgagcccag

SEQ ID NO: 13592 - DNA, 122 bp, Homo sapiens
  misc_feature (61)..(62): /note="This region represents a CpG dinucleotide"
  misc_feature (61)..(61): /note="Nucleotide may be methylated to form 5-methylcytosine"
taagcttagaaaccattggtatgtggtgacagcagtttacctggtgatttcctctaggcacgcttactaatctgcttacaggaatggagaaagaatgattggactgattcaaggccggaggt

SEQ ID NO: 13593 - DNA, 122 bp, Homo sapiens
  misc_feature (61)..(62): /note="This region represents a CpG dinucleotide"
  misc_feature (61)..(61): /note="Nucleotide may be methylated to form 5-methylcytosine"
accttgtgcaagttacttcacccctgggtgagtcagtgtcttcattataggagagaaaaacggaaaaggtcccacctcatagggttatgaggcttaaatgagcttagcatttgcctggcgtg

SEQ ID NO: 13594 - DNA, 122 bp, Homo sapiens
  misc_feature (61)..(62): /note="This region represents a CpG dinucleotide"
  misc_feature (61)..(61): /note="Nucleotide may be methylated to form 5-methylcytosine"
catatgaactggacagtgtggaatgagcagacctgtagcacgggaagcagctaaactggacggtgtggaacgggcggacctgtagcacgggaagctgctacaggcactgggaggagaatggg

SEQ ID NO: 13595 - DNA, 122 bp, Homo sapiens
  misc_feature (61)..(62): /note="This region represents a CpG dinucleotide"
  misc_feature (61)..(61): /note="Nucleotide may be methylated to form 5-methylcytosine"
ttgttccatttagtctatcagagaccttagtttgttgatccgagaggataaattaatgtacgttccagtttaatgtgctccagagtaaagtgcctcaggctatgagatggactagcaattag

SEQ ID NO: 13596 - DNA, 122 bp, Homo sapiens
  misc_feature (61)..(62): /note="This region represents a CpG dinucleotide"
  misc_feature (61)..(61): /note="Nucleotide may be methylated to form 5-methylcytosine"
attttatgtgacatatcacacaacccagtgcatggtttacacaggtattattattattctcgagattcagagatgcagaaagatccaaaaacagcccaaggtcactgagccattgctgacag

SEQ ID NO: 13597 - DNA, 122 bp, Homo sapiens
  misc_feature (61)..(62): /note="This region represents a CpG dinucleotide"
  misc_feature (61)..(61): /note="Nucleotide may be methylated to form 5-methylcytosine"
gccagcccaggccttctctctctggtccttgcagtagcagagttttattctggccttccccgccccgataaagcaaggtgcctcccttccctctgtcaagtttttccgtcagactccctgct

SEQ ID NO: 13598 - DNA, 122 bp, Homo sapiens
  misc_feature (61)..(62): /note="This region represents a CpG dinucleotide"
  misc_feature (61)..(61): /note="Nucleotide may be methylated to form 5-methylcytosine"
gagaggctgggtgtggaatattctggctgtgctggctgtggacttagtcctgtgtcttcccgcatccagtgtagtctctggagaaagaatgcctgagctttaccagcaccacccaggaagcc

SEQ ID NO: 13599 - DNA, 122 bp, Homo sapiens
  misc_feature (61)..(62): /note="This region represents a CpG dinucleotide"
  misc_feature (61)..(61): /note="Nucleotide may be methylated to form 5-methylcytosine"
ttagctcctggtactattcacattttctgcagtccgttatgccacttttgcatcatgagacgctattccttatgttgatctatacctctgacagatgaaccatcccaaaagaagagtccata

SEQ ID NO: 13600 - DNA, 122 bp, Homo sapiens
  misc_feature (61)..(62): /note="This region represents a CpG dinucleotide"
  misc_feature (61)..(61): /note="Nucleotide may be methylated to form 5-methylcytosine"
ggaaagaaagtcaacatgttaatggctctgcctgtttgcagtgttaactggctcacaagacggagaaggattatgctctgacacttgtgtatccttgctgaacttggaatgcgacagctcag

SEQ ID NO: 13601 - DNA, 122 bp, Homo sapiens
  misc_feature (61)..(62): /note="This region represents a CpG dinucleotide"
  misc_feature (61)..(61): /note="Nucleotide may be methylated to form 5-methylcytosine"
gtgctgggattacaggcgtgagccaccacgcctggctgcaaccagcttttcttaagagcacggtttcttaatccaggcctgtgatcctctgatgcacagagatttgttggcatgtctgtcat

SEQ ID NO: 13602 - DNA, 122 bp, Homo sapiens
  misc_feature (61)..(62): /note="This region represents a CpG dinucleotide"
  misc_feature (61)..(61): /note="Nucleotide may be methylated to form 5-methylcytosine"
catatcctttgactcggcaattgcactggcaggaattctgctgttatcctcacacacatacggctccaggcatatgtctaaggatcctcatagcagcaatgtctgcaagacttagtcactgg

SEQ ID NO: 13603 - DNA, 122 bp, Homo sapiens
  misc_feature (61)..(62): /note="This region represents a CpG dinucleotide"
  misc_feature (61)..(61): /note="Nucleotide may be methylated to form 5-methylcytosine"
taacaagaaaccaatttttcagaggccaagagtcccaacagggccgagaatctggccactcgcctatggctctggaggtggcatgacaaataagggtggcatgacaaatataggttaactga

SEQ ID NO: 13604 - DNA, 122 bp, Homo sapiens
  misc_feature (61)..(62): /note="This region represents a CpG dinucleotide"
  misc_feature (61)..(61): /note="Nucleotide may be methylated to form 5-methylcytosine"
taagcctcttttcttcataaattacccagtctcaggtagttctttatagcaatgtgagaacggatttatataattgtcattctgcactcctgtggggggaggtgtccttctctcttgttttc

SEQ ID NO: 13605 - DNA, 122 bp, Homo sapiens
  misc_feature (61)..(62): /note="This region represents a CpG dinucleotide"
  misc_feature (61)..(61): /note="Nucleotide may be methylated to form 5-methylcytosine"
gcatccctctgtacttgaatttcattctgcttcatgtagccaggcttcttttaccagggtcgtcatttcagttcctgggtaaacttcagctttacgtgagcccctgccctgctgtgaagcaa

SEQ ID NO: 13606 - DNA, 122 bp, Homo sapiens
  misc_feature (61)..(62): /note="This region represents a CpG dinucleotide"
  misc_feature (61)..(61): /note="Nucleotide may be methylated to form 5-methylcytosine"
ccaaggggtggagctgggaacattcctcataaagcgagtcgtcaaggagttgcaggtaagcgacacgcagggagccccggtcacgcttggcttccgtgtggtcaggtcagcgaacctcgtgg

SEQ ID NO: 13607 - DNA, 122 bp, Homo sapiens
  misc_feature (61)..(62): /note="This region represents a CpG dinucleotide"
  misc_feature (61)..(61): /note="Nucleotide may be methylated to form 5-methylcytosine"
cagcagcgatcacgcttctcgaccttggtgagtccagtgctgccggtttgcagactcatgcggatacacatgacagtctgcaaacaattcctggggctctgtgacctggagatgtccatcct

SEQ ID NO: 13608 - DNA, 122 bp, Homo sapiens
  misc_feature (61)..(62): /note="This region represents a CpG dinucleotide"
  misc_feature (61)..(61): /note="Nucleotide may be methylated to form 5-methylcytosine"
accaggcacctgcttcagagctggagctggagaagcacggagccggggtggggctggacacgcacggagccggggtggggctggacacgcagccctggggcccgcctcattgctctggctca

SEQ ID NO: 13609 - DNA, 122 bp, Homo sapiens
  misc_feature (61)..(62): /note="This region represents a CpG dinucleotide"
  misc_feature (61)..(61): /note="Nucleotide may be methylated to form 5-methylcytosine"
cctgaaacctatgccaagggccacagggccttagacagagtcagcaggctccatcttgagcgagtgctgtaggcgtgtgtcgggaacagaaggattccttggcgacttctgccacaccctgg

SEQ ID NO: 13610 - DNA, 122 bp, Homo sapiens
  misc_feature (61)..(62): /note="This region represents a CpG dinucleotide"
  misc_feature (61)..(61): /note="Nucleotide may be methylated to form 5-methylcytosine"
atcctgaaatatacccaacacaagttcatatatgattcctttttcagggatcttctcatacgacttcaagaaaaggtgaatcacataaacaaaaaaacacgtccacttctactgaaaagagg

SEQ ID NO: 13611 - DNA, 122 bp, Homo sapiens
  misc_feature (61)..(62): /note="This region represents a CpG dinucleotide"
  misc_feature (61)..(61): /note="Nucleotide may be methylated to form 5-methylcytosine"
gatgctgactagctgggtcttcttggattagtcacccaacttctaagctcattttgcaatcgataaggtgggacaataatacctacctcaaagggttgtggtgagttctaaatgcaataact

SEQ ID NO: 13612 - DNA, 122 bp, Homo sapiens
  misc_feature (61)..(62): /note="This region represents a CpG dinucleotide"
  misc_feature (61)..(61): /note="Nucleotide may be methylated to form 5-methylcytosine"
tcacatcatgtatcaaccagaagttcctcatatgcttgttgagaaatttttcttcctcagcgctccaggtttggctcagattttattaataaagaatctgcagtatctctgcatcctcagtg

SEQ ID NO: 13613 - DNA, 122 bp, Homo sapiens
  misc_feature (61)..(62): /note="This region represents a CpG dinucleotide"
  misc_feature (61)..(61): /note="Nucleotide may be methylated to form 5-methylcytosine"
tgttgttgaaaacttcttcaggtccccagtccacagtgatctctttttcctttaaatcctcggagcacttgtggtctgaacagtgccactagtttggaaatgaatcatatgctgcctgcaac

SEQ ID NO: 13614 - DNA, 122 bp, Homo sapiens
  misc_feature (61)..(62): /note="This region represents a CpG dinucleotide"
  misc_feature (61)..(61): /note="Nucleotide may be methylated to form 5-methylcytosine"
tccagccctgatctatccaggacactgccagccagactaatcctcctaaagctctactatcgtaatattttcaacactgtctctaaatttttgagcctggcatttgaggtcctccactccta

SEQ ID NO: 13615 - DNA, 122 bp, Homo sapiens
  misc_feature (61)..(62): /note="This region represents a CpG dinucleotide"
  misc_feature (61)..(61): /note="Nucleotide may be methylated to form 5-methylcytosine"
aggggcccagtcgtgcttggtgcagtccagtagggttcccacgtacgttttgttcctccacgtgacattgaccactaggacacctgcaggaggcaggggatgaaaaaggatcatagttacca

SEQ ID NO: 13616 - DNA, 122 bp, Homo sapiens
  misc_feature (61)..(62): /note="This region represents a CpG dinucleotide"
  misc_feature (61)..(61): /note="Nucleotide may be methylated to form 5-methylcytosine"
agtccatggtattttgtgctggcagcctgagcttactcacacactgcatgagtaagcatacgtctccactaggtgtctgcagtactagtgataactgtaagaacttagattcaccatgcagt

SEQ ID NO: 13617 - DNA, 122 bp, Homo sapiens
  misc_feature (61)..(62): /note="This region represents a CpG dinucleotide"
  misc_feature (61)..(61): /note="Nucleotide may be methylated to form 5-methylcytosine"
catttggaccagttcttctggagctcctggctgtcctcccttgtgtcctggacataggaacggggtctgctttggggatctaaccctcctttgtcaggcaagagggacagaggagttgagtc

SEQ ID NO: 13618 - DNA, 122 bp, Homo sapiens
  misc_feature (61)..(62): /note="This region represents a CpG dinucleotide"
  misc_feature (61)..(61): /note="Nucleotide may be methylated to form 5-methylcytosine"
ctcgagaattcgggaatcagagtttttaaggataatttggttggggcaggggcagtgaatcgggagtgctgattggttgactcacagatgaaatcatagagagttgaaactgtcctcttata

SEQ ID NO: 13619 - DNA, 122 bp, Homo sapiens
  misc_feature (61)..(62): /note="This region represents a CpG dinucleotide"
  misc_feature (61)..(61): /note="Nucleotide may be methylated to form 5-methylcytosine"
acgggggaggcaggaggaaggggatgggatattggggttgtggaagtaggggcagcagcacgtccctgaccccgaaagcacacaggagttagcatcaaagtgacctgggctcaaatcccatc

SEQ ID NO: 13620 - DNA, 122 bp, Homo sapiens
  misc_feature (61)..(62): /note="This region represents a CpG dinucleotide"
  misc_feature (61)..(61): /note="Nucleotide may be methylated to form 5-methylcytosine"
agaacagccagcagacaccaagtaaacaccacctaatgatgaacctggtcggaccattcacgccagttggcagatccataatttcatgggggcatcacccggagcaaagccagcaccagcct

SEQ ID NO: 13621 - DNA, 122 bp, Homo sapiens
  misc_feature (61)..(62): /note="This region represents a CpG dinucleotide"
  misc_feature (61)..(61): /note="Nucleotide may be methylated to form 5-methylcytosine"
gacacaaggtgacctcttgtatgtgctgcctagtctgccggagttatctaagcaatctgtcgacctttaaggtttcagctgtctctgtagggtaattgtctgatttcgagattttgggggtt

SEQ ID NO: 13622 - DNA, 122 bp, Homo sapiens
  misc_feature (61)..(62): /note="This region represents a CpG dinucleotide"
  misc_feature (61)..(61): /note="Nucleotide may be methylated to form 5-methylcytosine"
atcaggcaaaacacctcagtcatcttcagcctgcagagtgcgagttccgagttagattatcgtaattaatgggaagtgaattttatgaaagggcccagctgtgagggagaaaaaccctcaag

SEQ ID NO: 13623 - DNA, 122 bp, Homo sapiens
  misc_feature (61)..(62): /note="This region represents a CpG dinucleotide"
  misc_feature (61)..(61): /note="Nucleotide may be methylated to form 5-methylcytosine"
gaagttaagcagcttgccacaggtgacacagttggtaggtggtgatgcagactggagcgacggcttcacctgctgcatgaacctgctctctgtaagggctgcgagagaaaggcccaggcctg

SEQ ID NO: 13624 - DNA, 122 bp, Homo sapiens
  misc_feature (61)..(62): /note="This region represents a CpG dinucleotide"
  misc_feature (61)..(61): /note="Nucleotide may be methylated to form 5-methylcytosine"
agtgtgagagtcagagtggttaaaggacttacctaacgtgccatagctagaaagtggtgtcgagctggggccagagatcctgagaatcttatgatcaatccagttcattaggtacccaatag

SEQ ID NO: 13625 - DNA, 122 bp, Homo sapiens
  misc_feature (61)..(62): /note="This region represents a CpG dinucleotide"
  misc_feature (61)..(61): /note="Nucleotide may be methylated to form 5-methylcytosine"
tcctttagtctctatccatctccctctatcttcctgtgttgaaatcccaacaaagtccaacgagagcaaaggacacaggaaggaaaggtaggaacttactcaaggaatgcaattagtccact

SEQ ID NO: 13626 - DNA, 122 bp, Homo sapiens
  misc_feature (61)..(62): /note="This region represents a CpG dinucleotide"
  misc_feature (61)..(61): /note="Nucleotide may be methylated to form 5-methylcytosine"
agagtggcttcttagtattcttgcacagcaggtccgagtggcatccagactcaaacgggccgtgctcaggcccaacgctggcatgattcttgagtcattaggaaggattccttactgtggag

SEQ ID NO: 13627 - DNA, 122 bp, Homo sapiens
  misc_feature (61)..(62): /note="This region represents a CpG dinucleotide"
  misc_feature (61)..(61): /note="Nucleotide may be methylated to form 5-methylcytosine"
gcttgtcatttcctatctggaaccacgaaccctagttccacccctgagtttcctaatgctcgacataagcctctgaagccaatctgcattgtgcattgcagatggtacagaatcctcttgta

SEQ ID NO: 13628 - DNA, 122 bp, Homo sapiens
  misc_feature (61)..(62): /note="This region represents a CpG dinucleotide"
  misc_feature (61)..(61): /note="Nucleotide may be methylated to form 5-methylcytosine"
gaaggaagggcatgagtcacgcctcaccactgagaataaattcaagtgctgcctggttttcgtgagtgcatctcacttcctagctgcatgccttacaggacagaaaggtcctcagatctcca

SEQ ID NO: 13629 - DNA, 122 bp, Homo sapiens
  misc_feature (61)..(62): /note="This region represents a CpG dinucleotide"
  misc_feature (61)..(61): /note="Nucleotide may be methylated to form 5-methylcytosine"
gctctggacagaagcctgggattagtgagctgtgattacatcactccttttctgctcctccgcctttaagagcaagcttctttatgctatccctggatggttttgttccaacccctatgcta

SEQ ID NO: 13630 - DNA, 122 bp, Homo sapiens
  misc_feature (61)..(62): /note="This region represents a CpG dinucleotide"
  misc_feature (61)..(61): /note="Nucleotide may be methylated to form 5-methylcytosine"
caggttattctgaagaagctggatggcatcccagactgtgacattagcccagtgcagattcgcaaatgcacagagaagtttctttgcttcatgaaaggacattttgataacctttttagcaa

SEQ ID NO: 13631 - DNA, 122 bp, Homo sapiens
  misc_feature (61)..(62): /note="This region represents a CpG dinucleotide"
  misc_feature (61)..(61): /note="Nucleotide may be methylated to form 5-methylcytosine"
ataataatgatggctcacatttactgcgcattaactacatcaagtacttattgtaagtgacgcatgtgaccagttgccaattgttcaggctacagcttggatctgttagcatcctcatttaa

SEQ ID NO: 13632 - DNA, 122 bp, Homo sapiens
  misc_feature (61)..(62): /note="This region represents a CpG dinucleotide"
  misc_feature (61)..(61): /note="Nucleotide may be methylated to form 5-methylcytosine"
catttcaaagcccttgaatggcagctcaaaagtctccatctctttcagaataaaagccagcgtgcaaacgctctagtgtttctttgatcctacctttatctcccactctgtttcagccacac

SEQ ID NO: 13633 - DNA, 122 bp, Homo sapiens
  misc_feature (61)..(62): /note="This region represents a CpG dinucleotide"
  misc_feature (61)..(61): /note="Nucleotide may be methylated to form 5-methylcytosine"
tagatttcccatggctagatgccctgggagacaaatgtaggcaaattctgtggatgccaacgcaggtttctgacggctatcaaaagagtaacctggaaccaaggggatacaaattctctcaa

SEQ ID NO: 13634 - DNA, 122 bp, Homo sapiens
  misc_feature (61)..(62): /note="This region represents a CpG dinucleotide"
  misc_feature (61)..(61): /note="Nucleotide may be methylated to form 5-methylcytosine"
attgttattatgattattattcagaggaggagagtatcaggaaaggctgaagagaaatcacgaagtcttagaactggattggacctaggagattatttgggctaaactaccaaacacaggat

SEQ ID NO: 13635 - DNA, 122 bp, Homo sapiens
  misc_feature (61)..(62): /note="This region represents a CpG dinucleotide"
  misc_feature (61)..(61): /note="Nucleotide may be methylated to form 5-methylcytosine"
agggtccccttatatacctgccaactaggtgttgtgtacatgggtgtggatccacttatacgtgggtttggtctgcctgggagctattcctggtgcgtgattatcaagctaatagccattaa

SEQ ID NO: 13636 - DNA, 122 bp, Homo sapiens
  misc_feature (61)..(62): /note="This region represents a CpG dinucleotide"
  misc_feature (61)..(61): /note="Nucleotide may be methylated to form 5-methylcytosine"
tgacctgggagctgggccctgtgtgaaaaatgcagcctttcctcagatggaatgtgtgcccgtcacctctgaatcaaggtttctttccctggggtcaatagttgtgtaaatagctcagggac

SEQ ID NO: 13637 - DNA, 122 bp, Homo sapiens
  misc_feature (61)..(62): /note="This region represents a CpG dinucleotide"
  misc_feature (61)..(61): /note="Nucleotide may be methylated to form 5-methylcytosine"
ttttacagatgaggaaactatagcttagaagggttagggacttgctagagctcactaatacgtggtgaaatcaggcttcggcactacccaatactgcctcaacaggggactttgtataagtg

SEQ ID NO: 13638 - DNA, 122 bp, Homo sapiens
  misc_feature (61)..(62): /note="This region represents a CpG dinucleotide"
  misc_feature (61)..(61): /note="Nucleotide may be methylated to form 5-methylcytosine"
tctgaaacccttaaggataagctggaaccaaaggacagactggaacttgcatgggtcttacgctccttctaagccttcatctttgatgatgcatgatctgcaggagaaactgggacctttca

SEQ ID NO: 13639 - DNA, 122 bp, Homo sapiens
  misc_feature (61)..(62): /note="This region represents a CpG dinucleotide"
  misc_feature (61)..(61): /note="Nucleotide may be methylated to form 5-methylcytosine"
tctgttgaataacatgtttttacacagatacaaaggctgagtactagttgccaagtactacgagagatggcatgatttaagtagagagggaactggatttgaaatcagaaacaccttggtca

SEQ ID NO: 13640 - DNA, 122 bp, Homo sapiens
  misc_feature (61)..(62): /note="This region represents a CpG dinucleotide"
  misc_feature (61)..(61): /note="Nucleotide may be methylated to form 5-methylcytosine"
cagactcccaaggcctcccatgcagggcagggactccctccagcggtacgtaacccaacacgtgagaaaatgtcacccagggaacagagagaccagattaacttgataacatctgaaacccc

SEQ ID NO: 13641 - DNA, 122 bp, Homo sapiens
  misc_feature (61)..(62): /note="This region represents a CpG dinucleotide"
  misc_feature (61)..(61): /note="Nucleotide may be methylated to form 5-methylcytosine"
atgacctatggccagtaaaagaaacactggaatgagtcagcaggacaagtctcacagctccgtagatctgggaattccttacactgccaagaggtagaacagagaaacctcataatacatgg

SEQ ID NO: 13642 - DNA, 122 bp, Homo sapiens
  misc_feature (61)..(62): /note="This region represents a CpG dinucleotide"
  misc_feature (61)..(61): /note="Nucleotide may be methylated to form 5-methylcytosine"
tacaaggaaagcagacatgccaagttgctgcatttgtgaaattgaatgaaattctggctgcgttttatggctctgacctttgggaacagtccagggtcagactgctcacatgatgtgcttga

SEQ ID NO: 13643 - DNA, 122 bp, Homo sapiens
  misc_feature (61)..(62): /note="This region represents a CpG dinucleotide"
  misc_feature (61)..(61): /note="Nucleotide may be methylated to form 5-methylcytosine"
ttaccttctgatcctcaattttctcacttaaaagctgggatagtaatagtatctacctcacgggattactgtgaatattaaatgaggtgatacttgggaaaacacataggaagggcttagta

SEQ ID NO: 13644 - DNA, 122 bp, Homo sapiens
  misc_feature (61)..(62): /note="This region represents a CpG dinucleotide"
  misc_feature (61)..(61): /note="Nucleotide may be methylated to form 5-methylcytosine"
cgatgtgtacgtgcgtggggaggcgctcccaaaagctgcgctggggcagggtgtcctgaacggcgttaccagatgtatcttgacaaagaggttggcaccaccatgaagaccaattcaaccag

SEQ ID NO: 13645 - DNA, 122 bp, Homo sapiens
  misc_feature (61)..(62): /note="This region represents a CpG dinucleotide"
  misc_feature (61)..(61): /note="Nucleotide may be methylated to form 5-methylcytosine"
aagtaatccacctgcttcggcctcctaaagtgctgggattacagtgggcgtgagccatcacgcccagcccagttgactgtttagtgatgtaccaaggcttagggaaaagcctgaaatttctg

SEQ ID NO: 13646 - DNA, 122 bp, Homo sapiens
  misc_feature (61)..(62): /note="This region represents a CpG dinucleotide"
  misc_feature (61)..(61): /note="Nucleotide may be methylated to form 5-methylcytosine"
ttgaggcccagagggaagtggctgcccaggggttgtcttgtgagtcactgacagcaccaacgcatttcacctcaagaagcgcatgggattataagagcctggagattgaaaaatccctatag

SEQ ID NO: 13647 - DNA, 122 bp, Homo sapiens
  misc_feature (61)..(62): /note="This region represents a CpG dinucleotide"
  misc_feature (61)..(61): /note="Nucleotide may be methylated to form 5-methylcytosine"
ctatttgagagatttccccaatcttagggattttctcttccctcccttttgtgtgaaccacggacatttccaaaaggcaggtctgtacaaaaagttctattcagagaggtgctccccctcct

SEQ ID NO: 13648 - DNA, 122 bp, Homo sapiens
  misc_feature (61)..(62): /note="This region represents a CpG dinucleotide"
  misc_feature (61)..(61): /note="Nucleotide may be methylated to form 5-methylcytosine"
agaagggctgctacaactgaagggatttgtgagctcaaaatccctcctgctatctctctacgagcaagtgcaaaaactgctgacatttgttcttgtgtgtgaaaccagttttgaagttacaa

SEQ ID NO: 13649 - DNA, 122 bp, Homo sapiens
  misc_feature (61)..(62): /note="This region represents a CpG dinucleotide"
  misc_feature (61)..(61): /note="Nucleotide may be methylated to form 5-methylcytosine"
cacactggctctggccagcattatgctaaaaccctgttactctccaatgaaccagggaggcgggctcctctctgcgcctatcccttgagaattctgtcttaccagtgaagggtggggctgcc

SEQ ID NO: 13650 - DNA, 122 bp, Homo sapiens
  misc_feature (61)..(62): /note="This region represents a CpG dinucleotide"
  misc_feature (61)..(61): /note="Nucleotide may be methylated to form 5-methylcytosine"
atgcagataatgggtgaggcagtgagtcaggaacaaaatgcctttaaaccatggcccccacggccgggtgcggtagctcatgcctgtaatcccagcactttgggaggccgaggtgagtggat

SEQ ID NO: 13651 - DNA, 122 bp, Homo sapiens
  misc_feature (61)..(62): /note="This region represents a CpG dinucleotide"
  misc_feature (61)..(61): /note="Nucleotide may be methylated to form 5-methylcytosine"
gacctcacatgatccacccacctcggcttcccaaggcgtgattacaggcatgagccaccacgcctggccacacacaggttattgataatgttccagtactggggtggatggtagcttcattt

SEQ ID NO: 13652 - DNA, 122 bp, Homo sapiens
  misc_feature (61)..(62): /note="This region represents a CpG dinucleotide"
  misc_feature (61)..(61): /note="Nucleotide may be methylated to form 5-methylcytosine"
gggtgacaagtctgtcgtaagtgaaacgtttacaggcactacaggaatgacctggtgcctcgcccacttcattagaattctaattggggtgtgtaggagaggattctataaatggtaaggca

SEQ ID NO: 13653 - DNA, 122 bp, Homo sapiens
  misc_feature (61)..(62): /note="This region represents a CpG dinucleotide"
  misc_feature (61)..(61): /note="Nucleotide may be methylated to form 5-methylcytosine"
agaacaagaccagctggccttctgcagtccctgccaggtcccagccctgactttgtggttcgactttggtttgttcatccatgaaatggatgagcagaaccaactttggagagttgtagaga

SEQ ID NO: 13654 - DNA, 122 bp, Homo sapiens
  misc_feature (61)..(62): /note="This region represents a CpG dinucleotide"
  misc_feature (61)..(61): /note="Nucleotide may be methylated to form 5-methylcytosine"
tagtacgaaatgtggcagggatttgaaccagcagcccgagtcactggctttcttgacttgcgtattgacctgctgtcccctggggttcttgattttgccaccttgtctgactccagacattg

SEQ ID NO: 13655 - DNA, 122 bp, Homo sapiens
  misc_feature (61)..(62): /note="This region represents a CpG dinucleotide"
  misc_feature (61)..(61): /note="Nucleotide may be methylated to form 5-methylcytosine"
actggcaggtcttttaatttgagcttcagtttactcatatttcaaaaggatgcaatgatacgggagtgttgcacaacgcaggtttacatagtgtgctttgtgaactctaaagcatttcacta

SEQ ID NO: 13656 - DNA, 122 bp, Homo sapiens
  misc_feature (61)..(62): /note="This region represents a CpG dinucleotide"
  misc_feature (61)..(61): /note="Nucleotide may be methylated to form 5-methylcytosine"
aatttcattgtcttgcaggccaaatgtgtgtggaaacacccacctggtgatgagatatatcgcaaaggttcaatctctgtgtttgaagtggatggcaagaaaaacaaggtaaaaagtggtga

SEQ ID NO: 13657 - DNA, 122 bp, Homo sapiens
  misc_feature (61)..(62): /note="This region represents a CpG dinucleotide"
  misc_feature (61)..(61): /note="Nucleotide may be methylated to form 5-methylcytosine"
tgtgttgttactaggcaggagcagccaggtcattccataaatcatttctgtcatagctgacggtgatgcattccatctgctccatcactgcatgccatagtctgcacatttcaaatcccttc

SEQ ID NO: 13658 - DNA, 122 bp, Homo sapiens
  misc_feature (61)..(62): /note="This region represents a CpG dinucleotide"
  misc_feature (61)..(61): /note="Nucleotide may be methylated to form 5-methylcytosine"
gtcaactctgagtcagccaaacagctgaggtcattctctacttgtcaccaccgatgaggacggagagccaacaccaccagtcagtcacccaagctggaaatttaagcatcatcatttcttct

SEQ ID NO: 13659 - DNA, 122 bp, Homo sapiens
  misc_feature (61)..(62): /note="This region represents a CpG dinucleotide"
  misc_feature (61)..(61): /note="Nucleotide may be methylated to form 5-methylcytosine"
aatgtgtgtccatgagtgactactgaagccctcaggtgctctggtgacttcatatgcaagcgtggcctggcaggaactgcctgtgctatgactaatcaggagactttccagggaaaaggatg

SEQ ID NO: 13660 - DNA, 122 bp, Homo sapiens
  misc_feature (61)..(62): /note="This region represents a CpG dinucleotide"
  misc_feature (61)..(61): /note="Nucleotide may be methylated to form 5-methylcytosine"
aagtcccctcatataaccattgtaaagaaatgcacttgctttatatttatatagctgatgcggctaactttgctaaacctaaactggttgtgttgcaaaacagtgtaacatgactgagtcat

SEQ ID NO: 13661 - DNA, 122 bp, Homo sapiens
  misc_feature (61)..(62): /note="This region represents a CpG dinucleotide"
  misc_feature (61)..(61): /note="Nucleotide may be methylated to form 5-methylcytosine"
cacaagccatccccctccttcaactggaagtcaccccaaccctttcacttcccttgcttacggcacctgcccagaccacagccacagctgggctcaggtttcaattcttgtttcctccacac

SEQ ID NO: 13662 - DNA, 122 bp, Homo sapiens
  misc_feature (61)..(62): /note="This region represents a CpG dinucleotide"
  misc_feature (61)..(61): /note="Nucleotide may be methylated to form 5-methylcytosine"
cacagagtcagtgagtttacattcaccaacctatctcccttcagtaatcttctagaagagcgtttgtaggccacagggtgaaatctcgttaattcactgcacccagtctagcttgtttctat

SEQ ID NO: 13663 - DNA, 122 bp, Homo sapiens
  misc_feature (61)..(62): /note="This region represents a CpG dinucleotide"
  misc_feature (61)..(61): /note="Nucleotide may be methylated to form 5-methylcytosine"
ccccatgacacagtttgactcatcactgcccttcttaaagtaggtagtgtgggaaaaatacgtggaaaggaatgtaggatttatagtcaaagtcttattcctaagtctggatattcatcttt

SEQ ID NO: 13664 - DNA, 122 bp, Homo sapiens
  misc_feature (61)..(62): /note="This region represents a CpG dinucleotide"
  misc_feature (61)..(61): /note="Nucleotide may be methylated to form 5-methylcytosine"
gtgatgacctattaaattcattttaaagacttgtgttagtcactgatctggctggagggccgaatcaagggtgtatagatcaccctgttgtaatcttcagatccagactaaaaggccccaac

SEQ ID NO: 13665 - DNA, 122 bp, Homo sapiens
  misc_feature (61)..(62): /note="This region represents a CpG dinucleotide"
  misc_feature (61)..(61): /note="Nucleotide may be methylated to form 5-methylcytosine"
ttagctttagttgagcctcatgggctggctttgtgtcaagtaaaagctctactacaatgccgtccagtaaattggttttgtctgtgcagcaggcaggacaaacccttccgacgattataagg

SEQ ID NO: 13666 - DNA, 122 bp, Homo sapiens
  misc_feature (61)..(62): /note="This region represents a CpG dinucleotide"
  misc_feature (61)..(61): /note="Nucleotide may be methylated to form 5-methylcytosine"
tggctgtgtcccccctcaaatctcatcttgaatggtagctcacataattcccatgtgtcacgggagggacctggtgagaggtaactgaatcatggggacgggtttttcctgtgctggttctc

SEQ ID NO: 13667 - DNA, 122 bp, Homo sapiens
  misc_feature (61)..(62): /note="This region represents a CpG dinucleotide"
  misc_feature (61)..(61): /note="Nucleotide may be methylated to form 5-methylcytosine"
cataaaaatagaattaggcaatatgttgccttttgtgactggtttttttgctttgcataacgtcttcaagattcatcatgttgtagcttgtgtgaatatttcatgcctgttaatggctgaat

SEQ ID NO: 13668 - DNA, 122 bp, Homo sapiens
  misc_feature (61)..(62): /note="This region represents a CpG dinucleotide"
  misc_feature (61)..(61): /note="Nucleotide may be methylated to form 5-methylcytosine"
aactgtgactgttagcaatgaaaaaaatgtgacgatctgcagagagggaaagtgactaaacgtaatggcttgaggttcgaagggtaatggctacatatctacatggtgactaaatctacatg

SEQ ID NO: 13669 - DNA, 122 bp, Homo sapiens
  misc_feature (61)..(62): /note="This region represents a CpG dinucleotide"
  misc_feature (61)..(61): /note="Nucleotide may be methylated to form 5-methylcytosine"
cttgaattcctgtcctcaagaaatcctcccgcctctgccgcccagtgtcatgattaaaggcgtgagccaccacacccaactttcaactcccaacccgctccctggcactctctcaggctctg

SEQ ID NO: 13670 - DNA, 122 bp, Homo sapiens
  misc_feature (61)..(62): /note="This region represents a CpG dinucleotide"
  misc_feature (61)..(61): /note="Nucleotide may be methylated to form 5-methylcytosine"
ctgaaggtgtcttaaagtagttaaagacaggttctctagaaagctgactcacagtggtttcgatggcttacatgggtcaaatttgaaacatccttgtactaaaacaaaatagcgtaccaagt

SEQ ID NO: 13671 - DNA, 122 bp, Homo sapiens
  misc_feature (61)..(62): /note="This region represents a CpG dinucleotide"
  misc_feature (61)..(61): /note="Nucleotide may be methylated to form 5-methylcytosine"
aattgaagaataatataccgatagcttaggtctagggataaagctacatgacagctttcacgggataagcagagctcaagtaagtagttataactgtgatgacatttacaaagctgaagttg

SEQ ID NO: 13672 - DNA, 122 bp, Homo sapiens
  misc_feature (61)..(62): /note="This region represents a CpG dinucleotide"
  misc_feature (61)..(61): /note="Nucleotide may be methylated to form 5-methylcytosine"
ttgcttgtaatacatgtgtgtggaaatctacatgtaaccacttgcacattccatccctatcggataccttgggtaacctattacctgaatattaaatatttttgagaactcacaccattgac

SEQ ID NO: 13673 - DNA, 122 bp, Homo sapiens
  misc_feature (61)..(62): /note="This region represents a CpG dinucleotide"
  misc_feature (61)..(61): /note="Nucleotide may be methylated to form 5-methylcytosine"
gtcagggcactgctgctgacttgtatctgcggacactccccagtgtttgagtgatgtttacgtggaagcctggcgtgtaggaagctggcgcccctgggggaactgcaaggccattttacagc

SEQ ID NO: 13674 - DNA, 122 bp, Homo sapiens
  misc_feature (61)..(62): /note="This region represents a CpG dinucleotide"
  misc_feature (61)..(61): /note="Nucleotide may be methylated to form 5-methylcytosine"
agatgactcttggatgcttgagagagagaagcttagagtttttcctaggttcaggtttcacgcagccaaagtgggattagctgctgattagctaggaattgctgactaggatcagctctgtt

SEQ ID NO: 13675 - DNA, 122 bp, Homo sapiens
  misc_feature (61)..(62): /note="This region represents a CpG dinucleotide"
  misc_feature (61)..(61): /note="Nucleotide may be methylated to form 5-methylcytosine"
taagaagtctgaagggggagctgatagctggaggcagggttccatgactcaggctcttcacgtgctctaatatgttggcttcagtcctcaagctcgccacctcatgctcacacgatggctgc

SEQ ID NO: 13676 - DNA, 122 bp, Homo sapiens
  misc_feature (61)..(62): /note="This region represents a CpG dinucleotide"
  misc_feature (61)..(61): /note="Nucleotide may be methylated to form 5-methylcytosine"
actagatgcaaagctcatggctgagattgagagccagagagacccaaagtctctacatcacgcccacactggtacttccagcctaggaggcgtggtgaatgcctcccacagtggttgctgag

SEQ ID NO: 13677 - DNA, 122 bp, Homo sapiens
  misc_feature (61)..(62): /note="This region represents a CpG dinucleotide"
  misc_feature (61)..(61): /note="Nucleotide may be methylated to form 5-methylcytosine"
cttgggtgtgacacaactctaacatgcaaatatagtccagttttgccaacagctacaactcgttggcttacctcgagaaaactaaggtgtccctttaatgaacaaattattttcagactagt

SEQ ID NO: 13678 - DNA, 122 bp, Homo sapiens
  misc_feature (61)..(62): /note="This region represents a CpG dinucleotide"
  misc_feature (61)..(61): /note="Nucleotide may be methylated to form 5-methylcytosine"
aagcattatggaattaacaaaaccaaccttgctgagcttaactatggaatggaagtatgacgaaaggccgtgtagtagggagcagtccacctaggtataggcaataaagggactactgtctg

SEQ ID NO: 13679 - DNA, 122 bp, Homo sapiens
  misc_feature (61)..(62): /note="This region represents a CpG dinucleotide"
  misc_feature (61)..(61): /note="Nucleotide may be methylated to form 5-methylcytosine"
ctctaactaaacacatgagtgagcatttggtcatctcaggccaggcaggaatattggaaacggatggagcaaagtcacagacaaagcctgcatgcctgcatgccatgtttttaggttgtaag

SEQ ID NO: 13680 - DNA, 122 bp, Homo sapiens
  misc_feature (61)..(62): /note="This region represents a CpG dinucleotide"
  misc_feature (61)..(61): /note="Nucleotide may be methylated to form 5-methylcytosine"
gggcctcccagggagctggtaggagcaaggcaagctgcttgtcagtagagcaaaaaatggcgatgatgatctgacccaaggcattttgatcttagccactgtcagcagctggatgagcaatt

SEQ ID NO: 13681 - DNA, 122 bp, Homo sapiens
  misc_feature (61)..(62): /note="This region represents a CpG dinucleotide"
  misc_feature (61)..(61): /note="Nucleotide may be methylated to form 5-methylcytosine"
aattttttttaatttttaaaaatttgttgaaaaaccatcagccctgttaagttgctcacacgtgctgttgcagccccagctcacccggtagtaaatcctgctgacacagggtcccccacagc

SEQ ID NO: 13682 - DNA, 122 bp, Homo sapiens
  misc_feature (61)..(62): /note="This region represents a CpG dinucleotide"
  misc_feature (61)..(61): /note="Nucleotide may be methylated to form 5-methylcytosine"
gaaagaggagttctgacagcctcaggctccctcaccagctctgccagccctgacgggatgcgtgtccttgggcgtgtctgccacctgctcaggctcagcccatctgtaaaaggagggggcag

SEQ ID NO: 13683 - DNA, 122 bp, Homo sapiens
  misc_feature (61)..(62): /note="This region represents a CpG dinucleotide"
  misc_feature (61)..(61): /note="Nucleotide may be methylated to form 5-methylcytosine"
agccagaggaggtgcagactgagagagcacacgagcaccgatgtagagcttccactggagcgtctcctgagtggggaaactaggctggttctgttgcagtgctaattagtgcagaggtgatt

SEQ ID NO: 13684 - DNA, 122 bp, Homo sapiens
  misc_feature (61)..(62): /note="This region represents a CpG dinucleotide"
  misc_feature (61)..(61): /note="Nucleotide may be methylated to form 5-methylcytosine"
caggcctcttgggaagaataacactactatttatcattcccttaatcttgtgccaaacaccgtgctaagccctttccattcatcatctcaatccccacaacagcctggttagatagacgttc

SEQ ID NO: 13685 - DNA, 122 bp, Homo sapiens
  misc_feature (61)..(62): /note="This region represents a CpG dinucleotide"
  misc_feature (61)..(61): /note="Nucleotide may be methylated to form 5-methylcytosine"
aaggttaggggtgtaggaggcaattatgtctcttctctagcagctgccagagattactgccgtcagagtgattatcaccaaataattgttccctttcttccctgctgacagggcagaatggg

SEQ ID NO: 13686 - DNA, 122 bp, Homo sapiens
  misc_feature (61)..(62): /note="This region represents a CpG dinucleotide"
  misc_feature (61)..(61): /note="Nucleotide may be methylated to form 5-methylcytosine"
tataataattattaagctattgatatgaagcagaacacttcctcaaattaaggtacctttcgctgtaagtagcaaagactgccttcctgcagtaagtaaagaagtgactcttcaaatactgg

SEQ ID NO: 13687 - DNA, 122 bp, Homo sapiens
  misc_feature (61)..(62): /note="This region represents a CpG dinucleotide"
  misc_feature (61)..(61): /note="Nucleotide may be methylated to form 5-methylcytosine"
tctacaaaagaagtaggaatggctgctctggaaaaacagaagaaataaatgaacaaattacgaaggagaaacaggaaggtggggctcgtatgtaataagcatctaagaatgcagagaaataa

SEQ ID NO: 13688 - DNA, 122 bp, Homo sapiens
  misc_feature (61)..(62): /note="This region represents a CpG dinucleotide"
  misc_feature (61)..(61): /note="Nucleotide may be methylated to form 5-methylcytosine"
ttaatacgcactgaatgagcaaacgacagacaggcattagctcatttcctgtagtcttgccggggtaggtctgctgcagctttatcacctgctctaccaaggttaaatcacaggactgctca

SEQ ID NO: 13689 - DNA, 122 bp, Homo sapiens
  misc_feature (61)..(62): /note="This region represents a CpG dinucleotide"
  misc_feature (61)..(61): /note="Nucleotide may be methylated to form 5-methylcytosine"
tcacggggagggtgtgctggcgggatgggtggaagggcctggggccccggcagcccattgcggaggttttctcgggagatggtgggtatgggactaagggtgaaagggaagttgtgagttgg

SEQ ID NO: 13690 - DNA, 122 bp, Homo sapiens
  misc_feature (61)..(62): /note="This region represents a CpG dinucleotide"
  misc_feature (61)..(61): /note="Nucleotide may be methylated to form 5-methylcytosine"
tttttctttgcagagatgagggtgcaaagcagcagctttagaagccagaagccaggtcagcggtaaggatttaagggaggaggactgaacttctccacagttccctcctgagactgccccag

SEQ ID NO: 13691 - DNA, 122 bp, Homo sapiens
  misc_feature (61)..(62): /note="This region represents a CpG dinucleotide"
  misc_feature (61)..(61): /note="Nucleotide may be methylated to form 5-methylcytosine"
accccgccctggaggccttagctgccagggttacaagtaggtgtcctcactctcttgggacgtcaagctctcctgggagcggtggtgggctgagacctggggagccaaatcctgaggggctg

SEQ ID NO: 13692 - DNA, 122 bp, Homo sapiens
  misc_feature (61)..(62): /note="This region represents a CpG dinucleotide"
  misc_feature (61)..(61): /note="Nucleotide may be methylated to form 5-methylcytosine"
catctctcagaaaaaatgatgatgtggcaattctgtggataaaaaacatgggaagggaagcgtgttttcacccaggagaaacagttaaggaccatgcatttgcagtcttttccatgtcttta

SEQ ID NO: 13693 - DNA, 122 bp, Homo sapiens
  misc_feature (61)..(62): /note="This region represents a CpG dinucleotide"
  misc_feature (61)..(61): /note="Nucleotide may be methylated to form 5-methylcytosine"
tagatggcggccaaagcacccgccccatgctcctgactcccggggctcttcagggcattgcgaaaaccagcagcagagctgacacctggtccctgctcgggagccagcaaggcaggaggctg

SEQ ID NO: 13694 - DNA, 122 bp, Homo sapiens
  misc_feature (61)..(62): /note="This region represents a CpG dinucleotide"
  misc_feature (61)..(61): /note="Nucleotide may be methylated to form 5-methylcytosine"
gagtatgggccagggctgctgacttgcatgagttcaaatgaatattactaaaccagaacacgttccatgactacatgacatcattttgtattgtttcctctttcctggctgcttccctttta

SEQ ID NO: 13695 - DNA, 122 bp, Homo sapiens
  misc_feature (61)..(62): /note="This region represents a CpG dinucleotide"
  misc_feature (61)..(61): /note="Nucleotide may be methylated to form 5-methylcytosine"
tcgatggatcatcatctcctctagctactcagagcagggagctgggactgaactatagtacgtgaagtcattgtgtatattctcttagtgtgtcatttccccgcggagtcaccttccagaag

SEQ ID NO: 13696 - DNA, 122 bp, Homo sapiens
  misc_feature (61)..(62): /note="This region represents a CpG dinucleotide"
  misc_feature (61)..(61): /note="Nucleotide may be methylated to form 5-methylcytosine"
gcctcactggccaactgggaaacatccgctgtccaaatattataggacggactattcaaccgcatccctgagctctggtgaaataggcatgcagtataatggaattaacatgattaacagca

SEQ ID NO: 13697 - DNA, 122 bp, Homo sapiens
  misc_feature (61)..(62): /note="This region represents a CpG dinucleotide"
  misc_feature (61)..(61): /note="Nucleotide may be methylated to form 5-methylcytosine"
catgaagcaaatatagaaactctgtccctttgcagataggactgcctgttaagtgatggccggtcagacttacttgatgactcagtacagtgagagacaagcattagagctgttagttgtta

SEQ ID NO: 13698 - DNA, 122 bp, Homo sapiens
  misc_feature (61)..(62): /note="This region represents a CpG dinucleotide"
  misc_feature (61)..(61): /note="Nucleotide may be methylated to form 5-methylcytosine"
aaattctcagacaagcacaggacctctgtatgactgcacaggtcacaggtcgcacactcacgaagccagcccagtgctcaatactgtattttagaataagcaggaatcagtttagggctgcc

SEQ ID NO: 13699 - DNA, 122 bp, Homo sapiens
  misc_feature (61)..(62): /note="This region represents a CpG dinucleotide"
  misc_feature (61)..(61): /note="Nucleotide may be methylated to form 5-methylcytosine"
atgttgcacaactagggagggaaatgttgcacaactagggcatttagattctgcaatatacgttatcttgagtgccatccttgctaatggcaggttaagatactttagttttttgagacagg

SEQ ID NO: 13700 - DNA, 122 bp, Homo sapiens
  misc_feature (61)..(62): /note="This region represents a CpG dinucleotide"
  misc_feature (61)..(61): /note="Nucleotide may be methylated to form 5-methylcytosine"
tatagtttggaattaacagtcctgtgtgcctgcctgtttatccagtatcactaatgtcagcgcaaccaggagacatctaagggcacctggcttgcgacaagaggcagggcggaggcaagcag

SEQ ID NO: 13701 - DNA, 122 bp, Homo sapiens
  misc_feature (61)..(62): /note="This region represents a CpG dinucleotide"
  misc_feature (61)..(61): /note="Nucleotide may be methylated to form 5-methylcytosine"
cctcagtttcttatgaagttaaacatacacttaacatgtgactcgacaattccactcctacgtatctacccaagagaaatgacaagttatgtctagaaaaggatatgtactctaatgcttat

SEQ ID NO: 13702 - DNA, 122 bp, Homo sapiens
  misc_feature (61)..(62): /note="This region represents a CpG dinucleotide"
  misc_feature (61)..(61): /note="Nucleotide may be methylated to form 5-methylcytosine"
caaccctgtcctacgcacagcacctactactcatgatacaaatgtggtattaggtcatcacgctttggaagctgtgtcccaccctccacccatcctgtccacagaaaaaaatgtgattataa

SEQ ID NO: 13703 - DNA, 122 bp, Homo sapiens
  misc_feature (61)..(62): /note="This region represents a CpG dinucleotide"
  misc_feature (61)..(61): /note="Nucleotide may be methylated to form 5-methylcytosine"
ttggttaagatatggctgagggaggcatagggattttttttcaatggtagtcaccacagacggttgagggtaaattggcgttgttctcaataagggttattgtgaccatggtccaaagtctg

SEQ ID NO: 13704 - DNA, 122 bp, Homo sapiens
  misc_feature (61)..(62): /note="This region represents a CpG dinucleotide"
  misc_feature (61)..(61): /note="Nucleotide may be methylated to form 5-methylcytosine"
gattactgcagatattctagctgggtttggatttctcaccctgctccttggtcttgactgcgtgaaattcctccctgatgagccgtacattaaagtccgcatctgctttgttgctggagcca

SEQ ID NO: 13705 - DNA, 122 bp, Homo sapiens
  misc_feature (61)..(62): /note="This region represents a CpG dinucleotide"
  misc_feature (61)..(61): /note="Nucleotide may be methylated to form 5-methylcytosine"
ccttgctaggaagggctaagtctttaacatacattatctcccttaatcctaaaacaatcccgtaactattaatgttcccacttcataaatgaggaaacagagcttagagaaagaagctactt

SEQ ID NO: 13706 - DNA, 122 bp, Homo sapiens
  misc_feature (61)..(62): /note="This region represents a CpG dinucleotide"
  misc_feature (61)..(61): /note="Nucleotide may be methylated to form 5-methylcytosine"
gccatattcagattaaactcaacatttcagggcacaaagaacagaggaactcaaggaagccgactcaccaggttctccaaggcagatcagtgctcaggtaccaggggtttaagagtcgtgca

SEQ ID NO: 13707 - DNA, 122 bp, Homo sapiens
  misc_feature (61)..(62): /note="This region represents a CpG dinucleotide"
  misc_feature (61)..(61): /note="Nucleotide may be methylated to form 5-methylcytosine"
accatgttggccaggatggtctagatcgcttgactttgtgatccacccaccttggcctcccgaagtactgggaattacagatgtgagccaccacacccggccaagaccattgttcttaagca

SEQ ID NO: 13708 - DNA, 122 bp, Homo sapiens
  misc_feature (61)..(62): /note="This region represents a CpG dinucleotide"
  misc_feature (61)..(61): /note="Nucleotide may be methylated to form 5-methylcytosine"
cctcagctcaaaactctaaacacacattccagtgtgtctgccataaagggtcattctcagcgtaggcttaagttatatactgaattggcgtaggccatgaccttaagttaaattattgctgt

SEQ ID NO: 13709 - DNA, 122 bp, Homo sapiens
  misc_feature (61)..(62): /note="This region represents a CpG dinucleotide"
  misc_feature (61)..(61): /note="Nucleotide may be methylated to form 5-methylcytosine"
atcactaatttagcctgtttggcaaacactgcagctgatttcagtattactttttctccccgctccttgggaaaaaagcaacaccagaatagaacttgcaagcttcctttggactcataccc

SEQ ID NO: 13710 - DNA, 122 bp, Homo sapiens
  misc_feature (61)..(62): /note="This region represents a CpG dinucleotide"
  misc_feature (61)..(61): /note="Nucleotide may be methylated to form 5-methylcytosine"
tgctgtaagcacccctttccctcctccattctcttcaccctttcctccacattctcttgacggagagctggtcacaactggtcacatcaccgcagcaagggactgactaatgtcagccaggg

SEQ ID NO: 13711 - DNA, 122 bp, Homo sapiens
  misc_feature (61)..(62): /note="This region represents a CpG dinucleotide"
  misc_feature (61)..(61): /note="Nucleotide may be methylated to form 5-methylcytosine"
cgagcaccgtgctgtagcttaacacagaaaatcccaatgttaggacagaacactactagccgtagtacagagggccacttcataataataaaacatatttagcaggaagagagaatacttgc

SEQ ID NO: 13712 - DNA, 122 bp, Homo sapiens
  misc_feature (61)..(62): /note="This region represents a CpG dinucleotide"
  misc_feature (61)..(61): /note="Nucleotide may be methylated to form 5-methylcytosine"
tgtcagcattaactgagcttacaggtaactgtccaacagagctgtgattgcaattagaggcggactgaggaattgtgacgcacagcccaaaagtgtctgccacaaaaggcaagattatgact

SEQ ID NO: 13713 - DNA, 122 bp, Homo sapiens
  misc_feature (61)..(62): /note="This region represents a CpG dinucleotide"
  misc_feature (61)..(61): /note="Nucleotide may be methylated to form 5-methylcytosine"
gcttgtttgtcctttgtgtttagcacaggtgagaactggagccaaatgggaactttgctacgctgtgctcagcttgaggatttcttacccagctcactctggtctggagtctgaaagataat

SEQ ID NO: 13714 - DNA, 122 bp, Homo sapiens
  misc_feature (61)..(62): /note="This region represents a CpG dinucleotide"
  misc_feature (61)..(61): /note="Nucleotide may be methylated to form 5-methylcytosine"
ggctccttggccgagaactggatgtttcattttgtttaactgacatagctccatgtggctcgtagccactgtactgacttaaacatttgcaagcccaggtctcagcagccaggtcagtggtg

SEQ ID NO: 13715 - DNA, 122 bp, Homo sapiens
  misc_feature (61)..(62): /note="This region represents a CpG dinucleotide"
  misc_feature (61)..(61): /note="Nucleotide may be methylated to form 5-methylcytosine"
cttagaaatctggagtatttcgccttgatcctaaagccccatggaatgcttcgggtgtctcgccacatggtgaaggagatgggagaaaactggcagaggctctcccttcccacccagtttaa

SEQ ID NO: 13716 - DNA, 122 bp, Homo sapiens
  misc_feature (61)..(62): /note="This region represents a CpG dinucleotide"
  misc_feature (61)..(61): /note="Nucleotide may be methylated to form 5-methylcytosine"
gctcttctgatccttgtcagggagctttctgggggtgtcaccccgaggaatcggtgcatacgtatcattgtggactgccctttccaacgtagggcagtttcctgtgtgtattccacatgggg

SEQ ID NO: 13717 - DNA, 122 bp, Homo sapiens
  misc_feature (61)..(62): /note="This region represents a CpG dinucleotide"
  misc_feature (61)..(61): /note="Nucleotide may be methylated to form 5-methylcytosine"
atgatgtattctagctcctgtattgctaggattgactaaaagggaatgttaagtatttaacgtaggaatttagaagaggaataagtgagtaactttgttgcattacaaataatcaacaatgc

SEQ ID NO: 13718 - DNA, 122 bp, Homo sapiens
  misc_feature (61)..(62): /note="This region represents a CpG dinucleotide"
  misc_feature (61)..(61): /note="Nucleotide may be methylated to form 5-methylcytosine"
caatgcagctttactgaatccagaagtcagttataaaaccaagctaccttcctggggctccgcccacccttctctttccctttcttcactctctcctccctgacatccaatgctgcctccca

SEQ ID NO: 13719 - DNA, 122 bp, Homo sapiens
  misc_feature (61)..(62): /note="This region represents a CpG dinucleotide"
  misc_feature (61)..(61): /note="Nucleotide may be methylated to form 5-methylcytosine"
atgtcttgtttcttccatccagccctcctgctctttccattaacagtccagaacatgaaacggttattttgacatgatcattcttgccaggggtcttaaaaagttatgtttctttacatctg

SEQ ID NO: 13720 - DNA, 122 bp, Homo sapiens
  misc_feature (61)..(62): /note="This region represents a CpG dinucleotide"
  misc_feature (61)..(61): /note="Nucleotide may be methylated to form 5-methylcytosine"
gtgaccacttcttactcactcagagctttgtcatttcctgtttaaaatctttcagttggccgggtgcggtggctcacgcctgtaatcccagcactttgggaggctgaggcgggcggatcacg

SEQ ID NO: 13721 - DNA, 122 bp, Homo sapiens
  misc_feature (61)..(62): /note="This region represents a CpG dinucleotide"
  misc_feature (61)..(61): /note="Nucleotide may be methylated to form 5-methylcytosine"
gccaaacctgcaccagggttagatctcctgactccatcccaagccctttggaggcaccaacgccgccctttaggggatgagtcagcagctgaaattagatctttagctttgtgtgatcaaaa

SEQ ID NO: 13722 - DNA, 122 bp, Homo sapiens
  misc_feature (61)..(62): /note="This region represents a CpG dinucleotide"
  misc_feature (61)..(61): /note="Nucleotide may be methylated to form 5-methylcytosine"
caacaggaactttcaatcattgctggtgagaatgcaaaacagtacaatcacttagaaggccgtttggcaggttcctataaaactaaacattcatacaagcagccatgttctttgatacttac

SEQ ID NO: 13723 - DNA, 122 bp, Homo sapiens
  misc_feature (61)..(62): /note="This region represents a CpG dinucleotide"
  misc_feature (61)..(61): /note="Nucleotide may be methylated to form 5-methylcytosine"
cattgtagattttacactgctgattcatagagcttactcagctgattttcaccctgtcatcgttaagtggactatctggactttcatgcaagatgctgtgattttgaaaccaggtgggggga

SEQ ID NO: 13724 - DNA, 122 bp, Homo sapiens
  misc_feature (61)..(62): /note="This region represents a CpG dinucleotide"
  misc_feature (61)..(61): /note="Nucleotide may be methylated to form 5-methylcytosine"
atgacatcatcacgagagaaaacagcagcccgcagcctgaggagtggcagcagctggcaacggctagccttgtgaagctggggcggggtgggaggcagggcagcggcttctattttaagccg

SEQ ID NO: 13725 - DNA, 122 bp, Homo sapiens
  misc_feature (61)..(62): /note="This region represents a CpG dinucleotide"
  misc_feature (61)..(61): /note="Nucleotide may be methylated to form 5-methylcytosine"
tgtcatgagcaaatggatggatactgaggccactgcaagagggaaagagaaactatcaggcggggacacaggttttcagtatgtttttgcaaatgagcactttgccaaagtcaaaaacaaga

SEQ ID NO: 13726 - DNA, 122 bp, Homo sapiens
  misc_feature (61)..(62): /note="This region represents a CpG dinucleotide"
  misc_feature (61)..(61): /note="Nucleotide may be methylated to form 5-methylcytosine"
tgccttgacaacggtttcaacagttcctttacaaaatactgtgactgtgctgtatttcaccgactagcttgaattttgagcatgcagcaatttggttgccaagacaatcaaactgtcttgtc

SEQ ID NO: 13727 - DNA, 122 bp, Homo sapiens
  misc_feature (61)..(62): /note="This region represents a CpG dinucleotide"
  misc_feature (61)..(61): /note="Nucleotide may be methylated to form 5-methylcytosine"
taagtataataagggttacttgaacacaagaactgcaatgctgggacagctgatctgatacgagtcagctgctaagtgactaatatgtggatgctgaacaaaaggatgattcacatcctagg

SEQ ID NO: 13728 - DNA, 122 bp, Homo sapiens
  misc_feature (61)..(62): /note="This region represents a CpG dinucleotide"
  misc_feature (61)..(61): /note="Nucleotide may be methylated to form 5-methylcytosine"
ggataacaaataattcctatctcaaagggttattgtgaggattaaatgagaaaaagcaggcgagggtcatgtgactgactagaaaagttcattattagtcagtgttgtctgactgctttagc

SEQ ID NO: 13729 - DNA, 122 bp, Homo sapiens
  misc_feature (61)..(62): /note="This region represents a CpG dinucleotide"
  misc_feature (61)..(61): /note="Nucleotide may be methylated to form 5-methylcytosine"
gggcttgggtaaagtttaacattgtctcagataggaaaatgctgaggcatgttctctatgcggtttcccagatcccagtgggagttaccagttccttacagtggttactcgtttgctccaca

SEQ ID NO: 13730 - DNA, 122 bp, Homo sapiens
  misc_feature (61)..(62): /note="This region represents a CpG dinucleotide"
  misc_feature (61)..(61): /note="Nucleotide may be methylated to form 5-methylcytosine"
tggccccacattatgagtctcctgtcttggctacttttgagttaagcaatcctgggctcccgggactgattcctccatttcctgaggcaagctgctggggtttgggtggaatatgtgattaa

SEQ ID NO: 13731 - DNA, 122 bp, Homo sapiens
  misc_feature (61)..(62): /note="This region represents a CpG dinucleotide"
  misc_feature (61)..(61): /note="Nucleotide may be methylated to form 5-methylcytosine"
gaaatgagctttcagttatttaggtgcctccaaattattatgaattattgaggagcatcacgtttctaggtctttagaaaagagagggcatggcggttaaactggttttcccaatttctcca

SEQ ID NO: 13732 - DNA, 122 bp, Homo sapiens
  misc_feature (61)..(62): /note="This region represents a CpG dinucleotide"
  misc_feature (61)..(61): /note="Nucleotide may be methylated to form 5-methylcytosine"
acctcaagtgatccacctgcctcggcctcccaaagtgctaagattacaggtgtgagccaccgtgcccagccaagatatctgataatctttttgaagatcccttgtatgtgatgagtcacttc

SEQ ID NO: 13733 - DNA, 122 bp, Homo sapiens
  misc_feature (61)..(62): /note="This region represents a CpG dinucleotide"
  misc_feature (61)..(61): /note="Nucleotide may be methylated to form 5-methylcytosine"
acatgtctgcaaaccctacccacatgctcggatatgtttgaaatgaatgaattaatgaaccggtctggggtcaacagcttgaatttgtatacaggctccgccatttataggctaggtgagtc

SEQ ID NO: 13734 - DNA, 122 bp, Homo sapiens
  misc_feature (61)..(62): /note="This region represents a CpG dinucleotide"
  misc_feature (61)..(61): /note="Nucleotide may be methylated to form 5-methylcytosine"
ctgttctttctggcttcccttgccgctaggtgtggccaaatatgactaagtcctcacctccggactggaaacagaagtgatgcaaaccacctctggatctaactcttgcacactctttccat

SEQ ID NO: 13735 - DNA, 122 bp, Homo sapiens
  misc_feature (61)..(62): /note="This region represents a CpG dinucleotide"
  misc_feature (61)..(61): /note="Nucleotide may be methylated to form 5-methylcytosine"
cagcctgcggctcacgcttgcttcagtgcagctgtgtatccttctgacatgagcctggggcggttacgtcctggggtcctccactcccagggcaccctcacctacagtgatcccggcttctg

SEQ ID NO: 13736 - DNA, 122 bp, Homo sapiens
  misc_feature (61)..(62): /note="This region represents a CpG dinucleotide"
  misc_feature (61)..(61): /note="Nucleotide may be methylated to form 5-methylcytosine"
tgctgatttgggaggtcagaatcttgttctgggctttattagcatttcgctcaagtcaagcgaatcaccttgtcaagtcatatgcagagaaggcagaacatgacgttggaggaaagaaaaca

SEQ ID NO: 13737 - DNA, 122 bp, Homo sapiens
  misc_feature (61)..(62): /note="This region represents a CpG dinucleotide"
  misc_feature (61)..(61): /note="Nucleotide may be methylated to form 5-methylcytosine"
caagtgtccttgcacaagccaggcaaagggagattagacgcacagcaagagaggaggcaacgtggccaccaaggcagaaattagaataatacggccacatgtcaaggagagccagcagccac

SEQ ID NO: 13738 - DNA, 122 bp, Homo sapiens
  misc_feature (61)..(62): /note="This region represents a CpG dinucleotide"
  misc_feature (61)..(61): /note="Nucleotide may be methylated to form 5-methylcytosine"
aacaagggcagcctcactttagaaagatcttcacagttgtcagctgggtgcgatggctcacgcctgcaatcctagcactttgggaggccaaggcaggtggatcacctgaggtcaggagttca

SEQ ID NO: 13739 - DNA, 122 bp, Homo sapiens
  misc_feature (61)..(62): /note="This region represents a CpG dinucleotide"
  misc_feature (61)..(61): /note="Nucleotide may be methylated to form 5-methylcytosine"
ggtgagcccaggagctaaaacataagtttgtgggatttctgacttaagctccctactctccgtgatctccccaacaccctctggctccttggggcctcccttttcagccctccagtgagcaa

SEQ ID NO: 13740 - DNA, 122 bp, Homo sapiens
  misc_feature (61)..(62): /note="This region represents a CpG dinucleotide"
  misc_feature (61)..(61): /note="Nucleotide may be methylated to form 5-methylcytosine"
gtagtaattcatgcttacaccagggatgagtaagtgtctgtttttctgaatcttctccctcgtgacatagtgtcactaatgaaattgtgtttgccaatctaatgggtgagaaatggtttctc

SEQ ID NO: 13741 - DNA, 122 bp, Homo sapiens
  misc_feature (61)..(62): /note="This region represents a CpG dinucleotide"
  misc_feature (61)..(61): /note="Nucleotide may be methylated to form 5-methylcytosine"
gtatttgagactttagtcattgcctgttctgagccatcacattacagagacaggcctaggcgccacctagcccttcattagtaagagtgcacttcctagagattctaggttcactgcagtga

SEQ ID NO: 13742 - DNA, 122 bp, Homo sapiens
  misc_feature (61)..(62): /note="This region represents a CpG dinucleotide"
  misc_feature (61)..(61): /note="Nucleotide may be methylated to form 5-methylcytosine"
ttaaaagaagtcaattatccctcttatgactgattcataatttagccataaggagctggacgttacttcattctgacaatgagccatgatccctttgttaggccaagtttagacaaggaatc

SEQ ID NO: 13743 - DNA, 122 bp, Homo sapiens
  misc_feature (61)..(62): /note="This region represents a CpG dinucleotide"
  misc_feature (61)..(61): /note="Nucleotide may be methylated to form 5-methylcytosine"
taggctaccaagaagaactgcatcttcaacaggtttgtgctcagtcattagttttccacacgttctttcagaatgatgtgttgaataaaatacatcattgcacaaatctttgtcaaagagat

SEQ ID NO: 13744 - DNA, 122 bp, Homo sapiens
  misc_feature (61)..(62): /note="This region represents a CpG dinucleotide"
  misc_feature (61)..(61): /note="Nucleotide may be methylated to form 5-methylcytosine"
taaagggactgaggcccatcacgaatcctaaaccagtgcctcagctggtccagggggcaacgggatagtcgatgtcacagtgccaggcttggaaccaagaaagtccaaacagacaacgctga

SEQ ID NO: 13745 - DNA, 122 bp, Homo sapiens
  misc_feature (61)..(62): /note="This region represents a CpG dinucleotide"
  misc_feature (61)..(61): /note="Nucleotide may be methylated to form 5-methylcytosine"
acaaacaaaaggtgtccactccttttctccaggctcttaacatgcttgtaagattctttacgtcttagctttccctgaactgccttctacatgtttttgaaagtgaaaaaaaaactgaaagg

SEQ ID NO: 13746 - DNA, 122 bp, Homo sapiens
  misc_feature (61)..(62): /note="This region represents a CpG dinucleotide"
  misc_feature (61)..(61): /note="Nucleotide may be methylated to form 5-methylcytosine"
tgttctccacacacccagtgctgttctttcttggaccatggcagctgtgagtcagcgcaccgtgtagtttgtgcatccttgtgatgaatgcacaggatgacatttgtttccctgagctctgc

SEQ ID NO: 13747 - DNA, 122 bp, Homo sapiens
  misc_feature (61)..(62): /note="This region represents a CpG dinucleotide"
  misc_feature (61)..(61): /note="Nucleotide may be methylated to form 5-methylcytosine"
accacgttgtggatcacctgaccccgcctttctcagcttcctggaggtgcattctaagagcgctccccataagccaacactcaagtctcttcgaggtgtgtttccagggagcctgatctaag

SEQ ID NO: 13748 - DNA, 122 bp, Homo sapiens
  misc_feature (61)..(62): /note="This region represents a CpG dinucleotide"
  misc_feature (61)..(61): /note="Nucleotide may be methylated to form 5-methylcytosine"
gttcataatcctgcaatgattcacactcagaataaaacccagagctcataccatggcttgcgtgttcaagcccctggttattgccacgttttcatcgctgcagtctctccttgcaggtttgc

SEQ ID NO: 13749 - DNA, 122 bp, Homo sapiens
  misc_feature (61)..(62): /note="This region represents a CpG dinucleotide"
  misc_feature (61)..(61): /note="Nucleotide may be methylated to form 5-methylcytosine"
cttgactgcccctccctgtcctgacttgtgaaggttgctttgtgctttgacagacaggagcggcctggattggaaagggcctgtgtcttaatgcagaaatgccttactatgttccagccttc

SEQ ID NO: 13750 - DNA, 122 bp, Homo sapiens
  misc_feature (61)..(62): /note="This region represents a CpG dinucleotide"
  misc_feature (61)..(61): /note="Nucleotide may be methylated to form 5-methylcytosine"
catggaattttatcttctactaccaggagcacacatgtcttacaaggctttcagcatgcccgccacttcttgttcctcatgtgcaatcagcatgatgtcattgacataatggattgatgtaa

SEQ ID NO: 13751 - DNA, 122 bp, Homo sapiens
  misc_feature (61)..(62): /note="This region represents a CpG dinucleotide"
  misc_feature (61)..(61): /note="Nucleotide may be methylated to form 5-methylcytosine"
ggaccatgaggacccaggacccagaaggcaggacagtttctcttccacatgtcgccacagcgggatgcaggcactgccatcaacgcctgtcacttggattgagcaagaacagcctctcccca

SEQ ID NO: 13752 - DNA, 122 bp, Homo sapiens
  misc_feature (61)..(62): /note="This region represents a CpG dinucleotide"
  misc_feature (61)..(61): /note="Nucleotide may be methylated to form 5-methylcytosine"
tgcctcggcctcccaaagtgctgggattacaggcatgagccaccacgcctggtctatggacgtgctttctaaccctgaatgtgtaatggggagttgtggcttcagatttgcattttaccaag

SEQ ID NO: 13753 - DNA, 122 bp, Homo sapiens
  misc_feature (61)..(62): /note="This region represents a CpG dinucleotide"
  misc_feature (61)..(61): /note="Nucleotide may be methylated to form 5-methylcytosine"
gggagggctattttcctgaactgaaatagggtgaactggttccctgaagactaaccaagacgctaatgcaaagaaggacactcctgctgggcagacaaaaatgacagaggctcagagaagta

SEQ ID NO: 13754 - DNA, 122 bp, Homo sapiens
  misc_feature (61)..(62): /note="This region represents a CpG dinucleotide"
  misc_feature (61)..(61): /note="Nucleotide may be methylated to form 5-methylcytosine"
tgccccttgacagggtgtcagaatcgattgtactaagtcacgcacctttggcagttcaaccgtgttcctaatagttaaaaccataacccattcgggaggtgtccacaccgtcccttcccatc

SEQ ID NO: 13755 - DNA, 122 bp, Homo sapiens
  misc_feature (61)..(62): /note="This region represents a CpG dinucleotide"
  misc_feature (61)..(61): /note="Nucleotide may be methylated to form 5-methylcytosine"
cagtggctcgcatgggccttcttatctccttggcccagctgaatcttggtgagctggtagcgagttatgatctgggcatcctggaggagccagcttccagggtagcatcaattgctgggagg

SEQ ID NO: 13756 - DNA, 122 bp, Homo sapiens
  misc_feature (61)..(62): /note="This region represents a CpG dinucleotide"
  misc_feature (61)..(61): /note="Nucleotide may be methylated to form 5-methylcytosine"
taacatgaaccctatgactcagtaaatttagtcaccaggttacctgaaagggacacaacacgtcactcacctgggttctacccacatctgctgcctgaatcattcccttcctcaagtaccgc

SEQ ID NO: 13757 - DNA, 122 bp, Homo sapiens
  misc_feature (61)..(62): /note="This region represents a CpG dinucleotide"
  misc_feature (61)..(61): /note="Nucleotide may be methylated to form 5-methylcytosine"
cctagggaggggaaccaatctacacacacacatacacacacgcacgcccgcgcacacacacgcatgcatacatggacatgcgagcctcccaggctgcacttctccctgcctgtggggcccta

SEQ ID NO: 13758 - DNA, 122 bp, Homo sapiens
  misc_feature (61)..(62): /note="This region represents a CpG dinucleotide"
  misc_feature (61)..(61): /note="Nucleotide may be methylated to form 5-methylcytosine"
ctttgaaatagagtgctcggaggacaaacatggctccattctggaggattattactagaacgttctagagagcctgttaagcaactttgaatggattgctgcgaagtttagggctggttata

SEQ ID NO: 13759 - DNA, 122 bp, Homo sapiens
  misc_feature (61)..(62): /note="This region represents a CpG dinucleotide"
  misc_feature (61)..(61): /note="Nucleotide may be methylated to form 5-methylcytosine"
tgtaagccctttgctcaacatagctgttattaagcatcaaactggccgggcacagttactcgcgcctgtaatcccagtgttcctggaccaaaccgagggtcagctgcttattctcaaggccc

SEQ ID NO: 13760 - DNA, 122 bp, Homo sapiens
  misc_feature (61)..(62): /note="This region represents a CpG dinucleotide"
  misc_feature (61)..(61): /note="Nucleotide may be methylated to form 5-methylcytosine"
tagtcattatatcatctagacattgtatgaatgagtcagggaaggtcatctaagatcagacgtgtttgtgccaggatcacctggaggccccccagagttctggatttgactgtgctgaggta

SEQ ID NO: 13761 - DNA, 122 bp, Homo sapiens
  misc_feature (61)..(62): /note="This region represents a CpG dinucleotide"
  misc_feature (61)..(61): /note="Nucleotide may be methylated to form 5-methylcytosine"
ttccctgttctctcagaggctagattgctgaacctgatcggtaagaggcagtctgtgtgacggcacaggactaggatggccactgagtcatcctgagcaagttatctgacctctctgggcct

SEQ ID NO: 13762 - DNA, 122 bp, Homo sapiens
  misc_feature (61)..(62): /note="This region represents a CpG dinucleotide"
  misc_feature (61)..(61): /note="Nucleotide may be methylated to form 5-methylcytosine"
taactatgacaagatacaaaagcatgtgtttgccataaatagccctggctaacagcaaaccgctcacactgagcagatcaaattctctataaggagcacagtctggaccatagccaaatccc

SEQ ID NO: 13763 - DNA, 122 bp, Homo sapiens
  misc_feature (61)..(62): /note="This region represents a CpG dinucleotide"
  misc_feature (61)..(61): /note="Nucleotide may be methylated to form 5-methylcytosine"
ttcaaaaattcttcccaggcaattctgacgaagacagctcagttcaggtctgtgaactggcgtctgtaaactgctgctctagtgcttttacattttctagccctgtcttgtctgtaactttg

SEQ ID NO: 13764 - DNA, 122 bp, Homo sapiens
  misc_feature (61)..(62): /note="This region represents a CpG dinucleotide"
  misc_feature (61)..(61): /note="Nucleotide may be methylated to form 5-methylcytosine"
tgttctagatgagtcagatgctaacacatgccaatatttaaaagcatcagcttaagggcacgctgcctgagtttgaatcccacctctacctctggtcatatatttctggatctataaaatgg

SEQ ID NO: 13765 - DNA, 122 bp, Homo sapiens
  misc_feature (61)..(62): /note="This region represents a CpG dinucleotide"
  misc_feature (61)..(61): /note="Nucleotide may be methylated to form 5-methylcytosine"
gacctcaagtgattcacccgcctcagcctcccacagtgtggtgattacagatgtgagccacggcacctggcccacttgtaatacttttaatgcttttgctttatgttggcttttccatgatc

SEQ ID NO: 13766 - DNA, 122 bp, Homo sapiens
  misc_feature (61)..(62): /note="This region represents a CpG dinucleotide"
  misc_feature (61)..(61): /note="Nucleotide may be methylated to form 5-methylcytosine"
acttcactgttggagacctttcttctgagtgctgccctggggtgctgttcaaaatccaggcgtctcatgaattatgctgccagatctaggaggagccagtcctctttggaactaggtgaact

SEQ ID NO: 13767 - DNA, 122 bp, Homo sapiens
  misc_feature (61)..(62): /note="This region represents a CpG dinucleotide"
  misc_feature (61)..(61): /note="Nucleotide may be methylated to form 5-methylcytosine"
ccagcctgtcttgcaggttgagtagggttgtgcgcttgggatctctgatcagaccggcaccgcagtgtgggagagaagctgtgtgaagagtctgtcgtctgactttggcaagggttcctctg

SEQ ID NO: 13768 - DNA, 122 bp, Homo sapiens
  misc_feature (61)..(62): /note="This region represents a CpG dinucleotide"
  misc_feature (61)..(61): /note="Nucleotide may be methylated to form 5-methylcytosine"
accttgtgatccacctgcctctgcctcccaaagtgttggaattacaggcgtgagccactgcgcccggccgaaaacagggttcttgatcagggtgtgctctggaaactgtagtctgacgaacc

SEQ ID NO: 13769 - DNA, 122 bp, Homo sapiens
  misc_feature (61)..(62): /note="This region represents a CpG dinucleotide"
  misc_feature (61)..(61): /note="Nucleotide may be methylated to form 5-methylcytosine"
agagatgactcacctgcatgtcatactctatttcatcctcagagcaaccctatgaggtcacgccattcacaggtgaggagcccagctcagagaggctaagtcatttgtctgtgggtacatag

SEQ ID NO: 13770 - DNA, 122 bp, Homo sapiens
  misc_feature (61)..(62): /note="This region represents a CpG dinucleotide"
  misc_feature (61)..(61): /note="Nucleotide may be methylated to form 5-methylcytosine"
attactgacaccttgagaacatccaccaagttgaggatggtgaaagatacctaagtcactcgaggaaagcaggttggtacaaagtagaaaaattacaccaggttggagaacaagaccagcag

SEQ ID NO: 13771 - DNA, 122 bp, Homo sapiens
  misc_feature (61)..(62): /note="This region represents a CpG dinucleotide"
  misc_feature (61)..(61): /note="Nucleotide may be methylated to form 5-methylcytosine"
acaatgaggcaggaggcatgggaaattctgctcggttttctctaaatcactgggatttggcggcctgctgtcctcagacacacccagactgtgactctaattgccctggtggtgtaaagtaa

SEQ ID NO: 13772 - DNA, 122 bp, Homo sapiens
  misc_feature (61)..(62): /note="This region represents a CpG dinucleotide"
  misc_feature (61)..(61): /note="Nucleotide may be methylated to form 5-methylcytosine"
aaggacacatgctgggaagcattaaatcaaggtgctgctcttctgtcaaactacggttgccgtggcctcctgaagaggaaaggtttggccaggcgggggcaggcccgacctttgctgaggct

SEQ ID NO: 13773 - DNA, 122 bp, Homo sapiens
  misc_feature (61)..(62): /note="This region represents a CpG dinucleotide"
  misc_feature (61)..(61): /note="Nucleotide may be methylated to form 5-methylcytosine"
acacagctttgagttttagttaaggttctgagtcacagaaatgacatcggttgagggtagcggggagaaaatattaggaacttgcacacgtgtattttgtcagcaaatttgagttcagtagc

SEQ ID NO: 13774 - DNA, 122 bp, Homo sapiens
  misc_feature (61)..(62): /note="This region represents a CpG dinucleotide"
  misc_feature (61)..(61): /note="Nucleotide may be methylated to form 5-methylcytosine"
gatactaataaacagtcacagtttggtatgacatggccatgacagagaagagtcacccaacgcaaactgggagggccagtgaacatttccaggaggaagtgacagaagttgccctgctgatg

SEQ ID NO: 13775 - DNA, 122 bp, Homo sapiens
  misc_feature (61)..(62): /note="This region represents a CpG dinucleotide"
  misc_feature (61)..(61): /note="Nucleotide may be methylated to form 5-methylcytosine"
ccagtctcttcccaccagtcttaagtctaggttttcagaacttctgactaactggcttcacgttggggttccaatgacctccttgttgggtttgatttgctggagtgactcacagaacttgg

SEQ ID NO: 13776 - DNA, 122 bp, Homo sapiens
  misc_feature (61)..(62): /note="This region represents a CpG dinucleotide"
  misc_feature (61)..(61): /note="Nucleotide may be methylated to form 5-methylcytosine"
ggttaaaatctaccattctctgccacaatgctgaaaagaaacctttgctccagcttgaaacgcagcatctgtcagcaaatggggagtcaaatcaagaagtctgaactcactgacagggaaag

SEQ ID NO: 13777 - DNA, 122 bp, Homo sapiens
  misc_feature (61)..(62): /note="This region represents a CpG dinucleotide"
  misc_feature (61)..(61): /note="Nucleotide may be methylated to form 5-methylcytosine"
tgctctcttaattctttggtcagcaggaattagtcctaccaagctttatcttggtcataccgaacattgtcctcaagcataagttaagtagccctgctataggatcacatttgtcagaagtt

SEQ ID NO: 13778 - DNA, 122 bp, Homo sapiens
  misc_feature (61)..(62): /note="This region represents a CpG dinucleotide"
  misc_feature (61)..(61): /note="Nucleotide may be methylated to form 5-methylcytosine"
ggatgaagaacagtgtcatatgatgttagagcttagagaatttctagttcaggccggacgcggtggctcacggctgtaatcccagcactttgggaggccgaggcaggtggatcatgatgtca

SEQ ID NO: 13779 - DNA, 122 bp, Homo sapiens
  misc_feature (61)..(62): /note="This region represents a CpG dinucleotide"
  misc_feature (61)..(61): /note="Nucleotide may be methylated to form 5-methylcytosine"
gctgagaggccatgagtagctgtccttgcccattgggctgtgactctgcctctctggtggcgctgtggtggagagtgcatgctgctgagtttactcagaggcttctcatcctgagagtgcca

SEQ ID NO: 13780 - DNA, 122 bp, Homo sapiens
  misc_feature (61)..(62): /note="This region represents a CpG dinucleotide"
  misc_feature (61)..(61): /note="Nucleotide may be methylated to form 5-methylcytosine"
cttcatagtcttcccaggaggtctatgcttaatttcatttagcctggggccatgtagcagcgggcatttggacaaatgcaagcagaaactcccctaaggacttagtaatttacaacttgctt

SEQ ID NO: 13781 - DNA, 122 bp, Homo sapiens
  misc_feature (61)..(62): /note="This region represents a CpG dinucleotide"
  misc_feature (61)..(61): /note="Nucleotide may be methylated to form 5-methylcytosine"
tgtcatatcccaggtgctgaagagagaatagggatccggcgagatgagggaggagacatacgttaggaagcacaaatgcctagaagagtcatgctaataaggcacctgtagtgagcattttc

SEQ ID NO: 13782 - DNA, 122 bp, Homo sapiens
  misc_feature (61)..(62): /note="This region represents a CpG dinucleotide"
  misc_feature (61)..(61): /note="Nucleotide may be methylated to form 5-methylcytosine"
gaaactctgccactatctccttaccttcccattactggcctttcccaattgtgtgacacacgccattgctggttcctggaatcattttagatggtgcaagatactggattaagcaaggcatg

SEQ ID NO: 13783 - DNA, 122 bp, Homo sapiens
  misc_feature (61)..(62): /note="This region represents a CpG dinucleotide"
  misc_feature (61)..(61): /note="Nucleotide may be methylated to form 5-methylcytosine"
ctttggcagctcatgaatctctctgagcctgtttcttcatctgtacctaccattccaggtcgtgagggttaagtatgatattgcatgtagagcacctagcatgaagcctggcacgtggtgat

SEQ ID NO: 13784 - DNA, 122 bp, Homo sapiens
  misc_feature (61)..(62): /note="This region represents a CpG dinucleotide"
  misc_feature (61)..(61): /note="Nucleotide may be methylated to form 5-methylcytosine"
tctgcactcactataggctgggagctacactagggcctggggacatgaagacaggcgacacggtccctgggctcaagatgccagacagatgtgcaaacaagtgaaatctgatgtgatatgtg

SEQ ID NO: 13785 - DNA, 122 bp, Homo sapiens
  misc_feature (61)..(62): /note="This region represents a CpG dinucleotide"
  misc_feature (61)..(61): /note="Nucleotide may be methylated to form 5-methylcytosine"
gaagattaaatggactagaggaacacagagcttggggagaaaccactgcaggctcaaagacgcagagaccgaatctgtggaggtgaaatcacttgttgcgcatgtcacaaccagttaaaggt

SEQ ID NO: 13786 - DNA, 122 bp, Homo sapiens
  misc_feature (61)..(62): /note="This region represents a CpG dinucleotide"
  misc_feature (61)..(61): /note="Nucleotide may be methylated to form 5-methylcytosine"
acttattggaatgaatgagaagtgtccactttgccagatgtctgttagatacacgtgttacggatctaactctgggattcatttagcccagcatgcagaaacttgtgagatggtgaagtgag

SEQ ID NO: 13787 - DNA, 122 bp, Homo sapiens
  misc_feature (61)..(62): /note="This region represents a CpG dinucleotide"
  misc_feature (61)..(61): /note="Nucleotide may be methylated to form 5-methylcytosine"
tgaggatctggaaagggcaggcattgtggtagcaagaaagaggaaacctggaactaaacacgcaaaagcctaggccatcccctgggaccatcctgcacagggccttttcatctttgtggttc

SEQ ID NO: 13788 - DNA, 122 bp, Homo sapiens
  misc_feature (61)..(62): /note="This region represents a CpG dinucleotide"
  misc_feature (61)..(61): /note="Nucleotide may be methylated to form 5-methylcytosine"
aacaatcatgaatgtgctggtgttaaagaaccataaccgtctagtgaattctgaagtcagcgtagcccgaagagacacaggtggctgcaatttaataccggtgtttaccagctgtgtgattt

SEQ ID NO: 13789 - DNA, 122 bp, Homo sapiens
  misc_feature (61)..(62): /note="This region represents a CpG dinucleotide"
  misc_feature (61)..(61): /note="Nucleotide may be methylated to form 5-methylcytosine"
ctttctctattgaagttgttcgagaacatttatggttatttcagcttcagtttctatttacgctgctggcttttatgcctcgacctcaggagggcattccaacttcaggttaactcacaagt

SEQ ID NO: 13790 - DNA, 122 bp, Homo sapiens
  misc_feature (61)..(62): /note="This region represents a CpG dinucleotide"
  misc_feature (61)..(61): /note="Nucleotide may be methylated to form 5-methylcytosine"
tgtggctcagagtggtcggcaagagctacaggcatcttcctgccacatgagtggagctagcggaggccaaacgtcactcagagacacccaggccccaccccagagactgacaggagcaacta

SEQ ID NO: 13791 - DNA, 122 bp, Homo sapiens
  misc_feature (61)..(62): /note="This region represents a CpG dinucleotide"
  misc_feature (61)..(61): /note="Nucleotide may be methylated to form 5-methylcytosine"
ttttctcaagtttggaaactttctgttctgcaaccagccagcgaaaattttgcttttaaacggctcagctgattgagtcaggcccactggataatctctgtattataggatcaactgacatg

SEQ ID NO: 13792 - DNA, 122 bp, Homo sapiens
  misc_feature (61)..(62): /note="This region represents a CpG dinucleotide"
  misc_feature (61)..(61): /note="Nucleotide may be methylated to form 5-methylcytosine"
gaagccagggatgcattggttttaatacagcaaaaagtatcccccagggttgcaaaatgacgtgggtttcacagggacaaacagtgatcacattagaaaataatgttatttccaaacacaag

SEQ ID NO: 13793 - DNA, 122 bp, Homo sapiens
  misc_feature (61)..(62): /note="This region represents a CpG dinucleotide"
  misc_feature (61)..(61): /note="Nucleotide may be methylated to form 5-methylcytosine"
cttcctcaggctacctggttggagcgtgccatctgtttcctgctttaccctgattgacaacgggctaacagccaagtcaagtcaacctgagtcctctcaaaacccttctttttgcactcccc

SEQ ID NO: 13794 - DNA, 122 bp, Homo sapiens
  misc_feature (61)..(62): /note="This region represents a CpG dinucleotide"
  misc_feature (61)..(61): /note="Nucleotide may be methylated to form 5-methylcytosine"
cagactgtcctgtgttgggatgtgaatcatctctttacccagagtatgcaccgctgtacacgctatctactcattagtcattgagctcatctgctccttgacagccaatcattatggcttga

SEQ ID NO: 13795 - DNA, 122 bp, Homo sapiens
  misc_feature (61)..(62): /note="This region represents a CpG dinucleotide"
  misc_feature (61)..(61): /note="Nucleotide may be methylated to form 5-methylcytosine"
ccatcttggcctcccaaagtgctgggattacaggcttgagccaccacacccagcctcaggcgtggctctaagccctttacatatatgaacttgctagtttattccatgtgtcagccctgtga

SEQ ID NO: 13796 - DNA, 122 bp, Homo sapiens
  misc_feature (61)..(62): /note="This region represents a CpG dinucleotide"
  misc_feature (61)..(61): /note="Nucleotide may be methylated to form 5-methylcytosine"
ggagcagtttagctggtgagtcaagatgtcacttgaggccgcagtcatctgaaggcttgacggaggctgaaagacctgttaccaagataattcacttgcatagctgttgcagaggcctcatt

SEQ ID NO: 13797 - DNA, 122 bp, Homo sapiens
  misc_feature (61)..(62): /note="This region represents a CpG dinucleotide"
  misc_feature (61)..(61): /note="Nucleotide may be methylated to form 5-methylcytosine"
tagtcatattccttctagcactccactgcaaattgggttaatctcataaactaactcaagcgtacttatgaattaatgacgacagtagcttaatatgctgctgttctcagagaaacaagcaa

SEQ ID NO: 13798 - DNA, 122 bp, Homo sapiens
  misc_feature (61)..(62): /note="This region represents a CpG dinucleotide"
  misc_feature (61)..(61): /note="Nucleotide may be methylated to form 5-methylcytosine"
gctctttaattaactttaatcctccaaaaatccatgctgcaatctgttctgacaatcccacgctccttaggaggccctcggcacgacctggcacatcctgtgggctggaggtggccggaatg

SEQ ID NO: 13799 - DNA, 122 bp, Homo sapiens
  misc_feature (61)..(62): /note="This region represents a CpG dinucleotide"
  misc_feature (61)..(61): /note="Nucleotide may be methylated to form 5-methylcytosine"
cttcctgttctccctccttacaggctgagttcttgggctccaagttgagcacagaaaatacgttcaaggccgggcgcggtggctcacgcctgtaatcccagcactttgggaggctgaggcag

SEQ ID NO: 13800 - DNA, 122 bp, Homo sapiens
  misc_feature (61)..(62): /note="This region represents a CpG dinucleotide"
  misc_feature (61)..(61): /note="Nucleotide may be methylated to form 5-methylcytosine"
gcatcataccaggctcacctgtagttctgcctgaaccatgcaatttagggtttaattatacgctgtcttgcattgtttctactaattgttgcataggtcaatcttatactttcattcatcat

SEQ ID NO: 13801 - DNA, 122 bp, Homo sapiens
  misc_feature (61)..(62): /note="This region represents a CpG dinucleotide"
  misc_feature (61)..(61): /note="Nucleotide may be methylated to form 5-methylcytosine"
ttgtttaatggagacttaaaagattgtttgaaagcaaaatattaaattaacctggtgaagcgttttcatgctcattggtgaagtgcctgtaggtgactgtagcttagactgtacattaggta

SEQ ID NO: 13802 - DNA, 122 bp, Homo sapiens
  misc_feature (61)..(62): /note="This region represents a CpG dinucleotide"
  misc_feature (61)..(61): /note="Nucleotide may be methylated to form 5-methylcytosine"
aaaccagcggggggttcggttaaaccagcggggggttcggtaacaagggacttttgtcagcgggtagtgaaattcatcagatttccaagctgctgctgttgatgctcctaaggaagcagaca

SEQ ID NO: 13803 - DNA, 122 bp, Homo sapiens
  misc_feature (61)..(62): /note="This region represents a CpG dinucleotide"
  misc_feature (61)..(61): /note="Nucleotide may be methylated to form 5-methylcytosine"
gatgagctaaaaaaagaacaaaattgcaaaacaaatctcataatgttttaagaaagtttacgaatctgtgcttgactgcattcaaagctgtcatgctctgctggttgacaagcttggattaa

SEQ ID NO: 13804 - DNA, 122 bp, Homo sapiens
  misc_feature (61)..(62): /note="This region represents a CpG dinucleotide"
  misc_feature (61)..(61): /note="Nucleotide may be methylated to form 5-methylcytosine"
tatttagctttttcagactctgtattagagacaggtaatgagatcccctttgggaatgagcgatgaactggccaaattacagttctaactagataagcgaaagccacagcaggccaggtgaa

SEQ ID NO: 13805 - DNA, 122 bp, Homo sapiens
  misc_feature (61)..(62): /note="This region represents a CpG dinucleotide"
  misc_feature (61)..(61): /note="Nucleotide may be methylated to form 5-methylcytosine"
acatgggctcttgcagaaaacatctgaagttagttatcccttcctttaatgcatgtgctgcgcttaaccatagcttgtgtcagatcacagccccaaggaataccttcaatggttgcccagag

SEQ ID NO: 13806 - DNA, 122 bp, Homo sapiens
  misc_feature (61)..(62): /note="This region represents a CpG dinucleotide"
  misc_feature (61)..(61): /note="Nucleotide may be methylated to form 5-methylcytosine"
ttcttttgctgagagctttttgttagtaaattctgctttcctcacctttcagcgtgttcacgtgcctaacttcttcctggttgtgggataagaacccaggttttcgctgagctaaggagaag

SEQ ID NO: 13807 - DNA, 122 bp, Homo sapiens
  misc_feature (61)..(62): /note="This region represents a CpG dinucleotide"
  misc_feature (61)..(61): /note="Nucleotide may be methylated to form 5-methylcytosine"
gcagcccaggtgtggttcgagatgtcactttggccccagtctttcctgctgcttcttgggcgccctgcccagccccagctagcccgacgcccctccagggcctcttgagtcatcactggtct

SEQ ID NO: 13808 - DNA, 122 bp, Homo sapiens
  misc_feature (61)..(62): /note="This region represents a CpG dinucleotide"
  misc_feature (61)..(61): /note="Nucleotide may be methylated to form 5-methylcytosine"
ggaaactggtgtggccactttacaggtcatgagcaggactcaggtgtcctccaggtcacacggatggtaagaaagaagcagggctggatttcatctcagatgatctggtttccagtcatgct

SEQ ID NO: 13809 - DNA, 122 bp, Homo sapiens
  misc_feature (61)..(62): /note="This region represents a CpG dinucleotide"
  misc_feature (61)..(61): /note="Nucleotide may be methylated to form 5-methylcytosine"
actagtacttgacagcatggtgcagtctcattcctcatgccttcgcattgtggcccgccacgctcctgagaaggacacacctccatagcatggagaggaaacagaggcacagagaggctaat

SEQ ID NO: 13810 - DNA, 122 bp, Homo sapiens
  misc_feature (61)..(62): /note="This region represents a CpG dinucleotide"
  misc_feature (61)..(61): /note="Nucleotide may be methylated to form 5-methylcytosine"
cttgctgtgacccttttaattccagtggtttgagtaacactatggtaatattggaagacacgccacagtgcaagtgtcagtcatgtgatgtgtatgcgatcattagaagtgacaggaggaaa

SEQ ID NO: 13811 - DNA, 122 bp, Homo sapiens
  misc_feature (61)..(62): /note="This region represents a CpG dinucleotide"
  misc_feature (61)..(61): /note="Nucleotide may be methylated to form 5-methylcytosine"
acttctgagacagtacaaggtgtgtccaggtgacttacctgtcactgggcagctgccatgcgcactcctcacacctgacgctgctcagggagaagccaggcagctataatagtgttcttggc

SEQ ID NO: 13812 - DNA, 122 bp, Homo sapiens
  misc_feature (61)..(62): /note="This region represents a CpG dinucleotide"
  misc_feature (61)..(61): /note="Nucleotide may be methylated to form 5-methylcytosine"
gtcacaaagtacgtgaataaagttgccaaggccatggctcagttctaagctggatggaaacgctttggaaactgaacattggagtgcagtcagaagacttcattacagtgtcacacagcaca

SEQ ID NO: 13813 - DNA, 122 bp, Homo sapiens
  misc_feature (61)..(62): /note="This region represents a CpG dinucleotide"
  misc_feature (61)..(61): /note="Nucleotide may be methylated to form 5-methylcytosine"
ctggaacttgcttgacagccagggagtgcctgccatggtaacacaggaacatgtagcctgcgcatgttagtgtaacaatcacacggcatccatgctagtcagttacacacagtcactcaaca

SEQ ID NO: 13814 - DNA, 122 bp, Homo sapiens
  misc_feature (61)..(62): /note="This region represents a CpG dinucleotide"
  misc_feature (61)..(61): /note="Nucleotide may be methylated to form 5-methylcytosine"
attgacctttgtgttatgaggtaatttgcttttttttttcttccacatccactaactgggcgtaagcttggaatgtatatctttgaaattgcaggtcaaagcctccgcattaaagcacccga

SEQ ID NO: 13815 - DNA, 122 bp, Homo sapiens
  misc_feature (61)..(62): /note="This region represents a CpG dinucleotide"
  misc_feature (61)..(61): /note="Nucleotide may be methylated to form 5-methylcytosine"
acacccaaagatgtcaatttactagtcacacctgcagccagtgtgctcagtgagagcaggcgctggcaagggtggggtgagggtgacatcttgtgggaaattttgtttgcccagtcactata

SEQ ID NO: 13816 - DNA, 122 bp, Homo sapiens
  misc_feature (61)..(62): /note="This region represents a CpG dinucleotide"
  misc_feature (61)..(61): /note="Nucleotide may be methylated to form 5-methylcytosine"
ttgtcgaggtgcaccagggtgtactttcagatctataatacacagtctggccatcacaaccgcattatttccctcatctcattccaaccctggtgtggtaaaaccaaagagacacaggatca

SEQ ID NO: 13817 - DNA, 122 bp, Homo sapiens
  misc_feature (61)..(62): /note="This region represents a CpG dinucleotide"
  misc_feature (61)..(61): /note="Nucleotide may be methylated to form 5-methylcytosine"
ctcatatctatttatactcacttctgcttacttgttgcttagtttctgacctcactggctcgtcttgaactttgtttatgcctgtttctgaaaaaagaaaaagtcctgatgactgattccct

SEQ ID NO: 13818 - DNA, 122 bp, Homo sapiens
  misc_feature (61)..(62): /note="This region represents a CpG dinucleotide"
  misc_feature (61)..(61): /note="Nucleotide may be methylated to form 5-methylcytosine"
atctgtctttggaacttgccacaaaatattgcagtaatgacagcccctgaggcagagaagcgaaagggatttaagaaggaatttctggagccacacattcagaacattaaatggatttagag

SEQ ID NO: 13819 - DNA, 122 bp, Homo sapiens
  misc_feature (61)..(62): /note="This region represents a CpG dinucleotide"
  misc_feature (61)..(61): /note="Nucleotide may be methylated to form 5-methylcytosine"
aggctcagggtcaccaccttcccctctgcttggccggcgccattcttccaaaccactctccgccaaagattccacggacagtcacctacaagacaacccagccgtcctttcagcagcggatc

SEQ ID NO: 13820 - DNA, 122 bp, Homo sapiens
  misc_feature (61)..(62): /note="This region represents a CpG dinucleotide"
  misc_feature (61)..(61): /note="Nucleotide may be methylated to form 5-methylcytosine"
aataaaagggaataactgcccttattcactaaacttctcagcaggaactcaaattaagtacgggataggaaagagtaggcagcaaaaaaaactaaagcccgtgtgaactgcattcttagaag

SEQ ID NO: 13821 - DNA, 122 bp, Homo sapiens
  misc_feature (61)..(62): /note="This region represents a CpG dinucleotide"
  misc_feature (61)..(61): /note="Nucleotide may be methylated to form 5-methylcytosine"
ttcacaaagcagatccaaatgggaagagaaatagaagtataatatgaaatacgggaagggcgaagatgagaggatagttgtttcatcattggggaatcttttaataagatgccaaaaaaaat

SEQ ID NO: 13822 - DNA, 122 bp, Homo sapiens
  misc_feature (61)..(62): /note="This region represents a CpG dinucleotide"
  misc_feature (61)..(61): /note="Nucleotide may be methylated to form 5-methylcytosine"
aggggtggacaggtaatcatgtcagcgatgattattggcataaaaaagaaaccttactaacggaaatataagaagacaggcaagattgcattagagagtcataaaagataaggtcaaagagc

SEQ ID NO: 13823 - DNA, 122 bp, Homo sapiens
  misc_feature (61)..(62): /note="This region represents a CpG dinucleotide"
  misc_feature (61)..(61): /note="Nucleotide may be methylated to form 5-methylcytosine"
acctagtggggttggtgctcagccagctaatgcttactcagggcaaattatgtgcgaggccgttacaaatgtcaacgcacttcatcctcaccataatcctttgagatagcagctgctgccgc

SEQ ID NO: 13824 - DNA, 122 bp, Homo sapiens
  misc_feature (61)..(62): /note="This region represents a CpG dinucleotide"
  misc_feature (61)..(61): /note="Nucleotide may be methylated to form 5-methylcytosine"
attggccaggccaacaaagtgatgatttaccggtttgtgactcgcgcgtcagtggaagagcgaatcacacaagtggccaagagaaagatgatgctgacacacctggttgtgcggcctgggct

SEQ ID NO: 13825 - DNA, 122 bp, Homo sapiens
  misc_feature (61)..(62): /note="This region represents a CpG dinucleotide"
  misc_feature (61)..(61): /note="Nucleotide may be methylated to form 5-methylcytosine"
cttgtttataccagtttattcaatcagtgagtcagctagcatttactgaatagtcatatgcgttgcttaatgatggggataatgttctgagaagtgcatccctgggaaattttgtcattgtg

SEQ ID NO: 13826 - DNA, 122 bp, Homo sapiens
  misc_feature (61)..(62): /note="This region represents a CpG dinucleotide"
  misc_feature (61)..(61): /note="Nucleotide may be methylated to form 5-methylcytosine"
cagcatcataagggcgtcagaccaagcagggcctcatataaatctgagcttcattctgagcgtattgggaagcccagcaggtttaagcagtggcaagggtggggacggggtgggcaggtcgt

SEQ ID NO: 13827 - DNA, 122 bp, Homo sapiens
  misc_feature (61)..(62): /note="This region represents a CpG dinucleotide"
  misc_feature (61)..(61): /note="Nucleotide may be methylated to form 5-methylcytosine"
gctgtaacttagagatcataggcaaaagataactgcaactccttctccaaacactcccttcgcaatcaacaaaagatgacattccaaaaacaaattatatataagcctttgaattcctaagt

SEQ ID NO: 13828 - DNA, 122 bp, Homo sapiens
  misc_feature (61)..(62): /note="This region represents a CpG dinucleotide"
  misc_feature (61)..(61): /note="Nucleotide may be methylated to form 5-methylcytosine"
atgctgcacgtgcacgtggaccgtgacccccaggagctggtcacgccggtcaagtttgcccgtctctggactgagatccccacagccatcaccatcaaggagtgagaggggtggaggcaggg

SEQ ID NO: 13829 - DNA, 122 bp, Homo sapiens
  misc_feature (61)..(62): /note="This region represents a CpG dinucleotide"
  misc_feature (61)..(61): /note="Nucleotide may be methylated to form 5-methylcytosine"
ctagctgtactgccgtctgacttccttcattagtgttcagggtggcaacattagatcacacgtcggtaggcttaagtggggagtgaattactcacaaatttcatcacagaggttatgcactg

SEQ ID NO: 13830 - DNA, 122 bp, Homo sapiens
  misc_feature (61)..(62): /note="This region represents a CpG dinucleotide"
  misc_feature (61)..(61): /note="Nucleotide may be methylated to form 5-methylcytosine"
gactcactgattacatccggcattcctctgactttgcagttagttaagtgaacataagcacgtcaccccctatacctttgccctagatctactactttttttctgtttgaatcatggatttg

SEQ ID NO: 13831 - DNA, 122 bp, Homo sapiens
  misc_feature (61)..(62): /note="This region represents a CpG dinucleotide"
  misc_feature (61)..(61): /note="Nucleotide may be methylated to form 5-methylcytosine"
aaaacgtggcttatccatacaatggcatatgattcagccttaaaaaagaaatcttgagcacgctacaacagggatgaacctggaggacatcacgctgaatgaaataagccaggcacaaaagg

SEQ ID NO: 13832 - DNA, 122 bp, Homo sapiens
  misc_feature (61)..(62): /note="This region represents a CpG dinucleotide"
  misc_feature (61)..(61): /note="Nucleotide may be methylated to form 5-methylcytosine"
tcataatgaaccagacagccatatggaagagagtggatcatcaagttggagtgacaagcacggacttcatcatcaaagatccacctaggcctttgctcagtgctctatcaaaatgtaggatt

SEQ ID NO: 13833 - DNA, 122 bp, Homo sapiens
  misc_feature (61)..(62): /note="This region represents a CpG dinucleotide"
  misc_feature (61)..(61): /note="Nucleotide may be methylated to form 5-methylcytosine"
agggactaacaccaagaaggccctccaggcagtgtacagcatgatgagctggccagatgacgtccctcctgaaggctggaaccgcacccgccatgtcatcatcctcatgactgatggtcaga

SEQ ID NO: 13834 - DNA, 122 bp, Homo sapiens
  misc_feature (61)..(62): /note="This region represents a CpG dinucleotide"
  misc_feature (61)..(61): /note="Nucleotide may be methylated to form 5-methylcytosine"
aagacagcaataaatcccacataataaaatatgctgtatttttctattgtttccttgacacgtcacatacaagtgctgtaaagaaacagttctgctgcattaactgtattctgaagtctaca

SEQ ID NO: 13835 - DNA, 122 bp, Homo sapiens
  misc_feature (61)..(62): /note="This region represents a CpG dinucleotide"
  misc_feature (61)..(61): /note="Nucleotide may be methylated to form 5-methylcytosine"
ctatttctgtctcctttttatagctaagggaactgaaccacagacaggttaagtggcttgcgcaagattgcacagccagtaagtagtagagccagcttcgaaatccaggcactcttgcagca

SEQ ID NO: 13836 - DNA, 122 bp, Homo sapiens
  misc_feature (61)..(62): /note="This region represents a CpG dinucleotide"
  misc_feature (61)..(61): /note="Nucleotide may be methylated to form 5-methylcytosine"
atctcagctcactgcaacctccacctcccaggttcaagctgttcttgtgcttcagcctcccgagtagctgagctgggtttacaggagcacaccaccacaccctgctaaattttgtattttta

SEQ ID NO: 13837 - DNA, 122 bp, Homo sapiens
  misc_feature (61)..(62): /note="This region represents a CpG dinucleotide"
  misc_feature (61)..(61): /note="Nucleotide may be methylated to form 5-methylcytosine"
ttagttgcttttatctcttacaaaaccttatttcaccctcacaaacatttgccaaatgtgcgtgtgaaagatcttgaaacagggattgcttcaaggtctgaagcagttgcaaaatattttga

SEQ ID NO: 13838 - DNA, 122 bp, Homo sapiens
  misc_feature (61)..(62): /note="This region represents a CpG dinucleotide"
  misc_feature (61)..(61): /note="Nucleotide may be methylated to form 5-methylcytosine"
agaagagaagctcagccaattatagtgaatgcatttggaaattaaaggctgaggccagggcggggattccaggctttgtggaaccagctccaggcagagtcattagtgttcttgatgtgaca

SEQ ID NO: 13839 - DNA, 122 bp, Homo sapiens
  misc_feature (61)..(62): /note="This region represents a CpG dinucleotide"
  misc_feature (61)..(61): /note="Nucleotide may be methylated to form 5-methylcytosine"
tgtgccaactaatgatgtgcctgtgacaaactgagtcatgctgaccgtgggactgcagaccgcagaggagagtgctctcatgaccccttggataaagcagtgaagctttgcatcacctgagg

SEQ ID NO: 13840 - DNA, 122 bp, Homo sapiens
  misc_feature (61)..(62): /note="This region represents a CpG dinucleotide"
  misc_feature (61)..(61): /note="Nucleotide may be methylated to form 5-methylcytosine"
aggcactgtgtaggcatttcctcattgtaatctcctttaatctttacaacagcaccatgacgtatttcctttatttctgaaaataactaaactgtgtctcagaggctaaataacttctctac

SEQ ID NO: 13841 - DNA, 122 bp, Homo sapiens
  misc_feature (61)..(62): /note="This region represents a CpG dinucleotide"
  misc_feature (61)..(61): /note="Nucleotide may be methylated to form 5-methylcytosine"
tttgctttcgatgaacaggctctaatccttttggcttccctgttcttagctcttagtgcacgtaatcaatctttcctgtttatcctgaagatcaacactgatgatcttacaacctgagacaa

SEQ ID NO: 13842 - DNA, 122 bp, Homo sapiens
  misc_feature (61)..(62): /note="This region represents a CpG dinucleotide"
  misc_feature (61)..(61): /note="Nucleotide may be methylated to form 5-methylcytosine"
ttttttgctgtcatcccttcagggcagtggatgtatctgacacctagtgaatacaggccacggatgttgcaaaacattctattatatagaaggcagtccccgacaacaaagaataatctgga

SEQ ID NO: 13843 - DNA, 122 bp, Homo sapiens
  misc_feature (61)..(62): /note="This region represents a CpG dinucleotide"
  misc_feature (61)..(61): /note="Nucleotide may be methylated to form 5-methylcytosine"
tgacaagagactcctcttcaagagcaggccacatatcctttatttcccagggggtggaaacgggcaacctcacagaggaattgaatcataatgaattgaagaaagaaaaatctcctgaagtt

SEQ ID NO: 13844 - DNA, 122 bp, Homo sapiens
  misc_feature (61)..(62): /note="This region represents a CpG dinucleotide"
  misc_feature (61)..(61): /note="Nucleotide may be methylated to form 5-methylcytosine"
actgtctgtctctccctcctctggccatgtaaaactgcctgcttcccctttgcaatctgccgtgattgtaagtttcctaaggcatacccagccatgcttcctgtagagcctgtggaactgtg

SEQ ID NO: 13845 - DNA, 122 bp, Homo sapiens
  misc_feature (61)..(62): /note="This region represents a CpG dinucleotide"
  misc_feature (61)..(61): /note="Nucleotide may be methylated to form 5-methylcytosine"
aaaagatatatacatacacacacacacatagacatatacacacacacaaaattagccgggcgtggtggcagatgcctgtaatcccagctacccagcaggctgaggcaggagaatcgcttgaa

SEQ ID NO: 13846 - DNA, 122 bp, Homo sapiens
  misc_feature (61)..(62): /note="This region represents a CpG dinucleotide"
  misc_feature (61)..(61): /note="Nucleotide may be methylated to form 5-methylcytosine"
aacagaaatgaaagtgtagagacattaagcaatccatccaaggtcacacagcagtagagtcggatctgtctggcagtaaaggctgtgatcttggccacagtatgacacactctcatccttcc

SEQ ID NO: 13847 - DNA, 122 bp, Homo sapiens
  misc_feature (61)..(62): /note="This region represents a CpG dinucleotide"
  misc_feature (61)..(61): /note="Nucleotide may be methylated to form 5-methylcytosine"
cgtgatctgcccgcctcggcctcccaaagtgctgggattacaggcgtgagccactgcacccggcctaaaacaataggttttgaattggactcagaatatagggagaataataataatcatgt

SEQ ID NO: 13848 - DNA, 122 bp, Homo sapiens
  misc_feature (61)..(62): /note="This region represents a CpG dinucleotide"
  misc_feature (61)..(61): /note="Nucleotide may be methylated to form 5-methylcytosine"
ttctggtctcttcctcctgagcacggttctcctggttgagctccaggccatgccattcaacgccctccaggacaggccgaagggcttgtctgtttggtggttgctaaggtttgaaaaaagcc

SEQ ID NO: 13849 - DNA, 122 bp, Homo sapiens
  misc_feature (61)..(62): /note="This region represents a CpG dinucleotide"
  misc_feature (61)..(61): /note="Nucleotide may be methylated to form 5-methylcytosine"
ggcaatccacctgcctcagcctcccaaagtgctaggattataggagtgagccaccgtgcccggcagcaagtattcttaatcaagaggttgagtgcagtggctcatgcctgtaatcccagcac

SEQ ID NO: 13850 - DNA, 122 bp, Homo sapiens
  misc_feature (61)..(62): /note="This region represents a CpG dinucleotide"
  misc_feature (61)..(61): /note="Nucleotide may be methylated to form 5-methylcytosine"
ctctttgctggggcctgcacctttcctggctgctgactcatagatgtcagagctgcaggacggctccacagaagccctgtgtttaggacacctcattagtgaaggagagtggagagtaaacc

SEQ ID NO: 13851 - DNA, 122 bp, Homo sapiens
  misc_feature (61)..(62): /note="This region represents a CpG dinucleotide"
  misc_feature (61)..(61): /note="Nucleotide may be methylated to form 5-methylcytosine"
attttctaatgggcctggacaggaggacccagctctgtttcttatgggtcttgtggatggcgctgggaaatcaggcttgcctaactggatatacagagcttagcattaacagctggacagag

SEQ ID NO: 13852 - DNA, 122 bp, Homo sapiens
  misc_feature (61)..(62): /note="This region represents a CpG dinucleotide"
  misc_feature (61)..(61): /note="Nucleotide may be methylated to form 5-methylcytosine"
ctaggagccaagttagtggatgagctggtttattgctcaggatgactgaagtctcaactacggaaccatgttacattcgagcagctgagacagcagctgaagccaggtcctcccgaagcttc

SEQ ID NO: 13853 - DNA, 122 bp, Homo sapiens
  misc_feature (61)..(62): /note="This region represents a CpG dinucleotide"
  misc_feature (61)..(61): /note="Nucleotide may be methylated to form 5-methylcytosine"
tttttgtcttggtgctttcaaggttttttctgtgtctttggcttcgaaacattttgactacgttgtgtgtgtttgtaaatcgttgagtttattatcatttgagtttgttgagccttctggat

SEQ ID NO: 13854 - DNA, 122 bp, Homo sapiens
  misc_feature (61)..(62): /note="This region represents a CpG dinucleotide"
  misc_feature (61)..(61): /note="Nucleotide may be methylated to form 5-methylcytosine"
gagcaagtgtacatcgttggcctcaggcacatttcatctgattgagtcatctggctcaagcggccactctggtcctttttgtaacccgactattaggggaaagcgtatgtgacagaatgtga

SEQ ID NO: 13855 - DNA, 122 bp, Homo sapiens
  misc_feature (61)..(62): /note="This region represents a CpG dinucleotide"
  misc_feature (61)..(61): /note="Nucleotide may be methylated to form 5-methylcytosine"
cctcatggcttgctgttatttcactcgcagagttcagatgttgttcattccagcagaggccggatgtgtaaatcatcctgcagcagttctgtcttgtatggccggaggctccttggtgggct

SEQ ID NO: 13856 - DNA, 122 bp, Homo sapiens
  misc_feature (61)..(62): /note="This region represents a CpG dinucleotide"
  misc_feature (61)..(61): /note="Nucleotide may be methylated to form 5-methylcytosine"
cattcatttcaaagttctgcaccacatggtgcttccagtcacactaaatagtaaaataatcgtggcttatgagtcttttcagagtcagtgagaaaatggaaggagggaattacacaatactc

SEQ ID NO: 13857 - DNA, 122 bp, Homo sapiens
  misc_feature (61)..(62): /note="This region represents a CpG dinucleotide"
  misc_feature (61)..(61): /note="Nucleotide may be methylated to form 5-methylcytosine"
gatacagtttggtttgcttggatttcactttgggattggaggccaatggcccaactgctacggcatacatttgtgaaatctcatacttggccagttagccatgttagatagggaggttacag

SEQ ID NO: 13858 - DNA, 122 bp, Homo sapiens
  misc_feature (61)..(62): /note="This region represents a CpG dinucleotide"
  misc_feature (61)..(61): /note="Nucleotide may be methylated to form 5-methylcytosine"
tttgtaggggatataaagaagagtgggtttagtattacaaaataagttcagtttaactaacgtgtgttagtgtcttttatatcccactgaagtgctgagtatacagaaattaagacagttct

SEQ ID NO: 13859 - DNA, 122 bp, Homo sapiens
  misc_feature (61)..(62): /note="This region represents a CpG dinucleotide"
  misc_feature (61)..(61): /note="Nucleotide may be methylated to form 5-methylcytosine"
ggtgcccatgccggagagaagttggcttcctggagccccactctgtgctactgtgaagggcggttccatccgcctaggttttgttagttctgtgagccatacaggattagcgtgccctgcag

SEQ ID NO: 13860 - DNA, 122 bp, Homo sapiens
  misc_feature (61)..(62): /note="This region represents a CpG dinucleotide"
  misc_feature (61)..(61): /note="Nucleotide may be methylated to form 5-methylcytosine"
cctccgctagaattagcctttcgggcctgcgcgcctacaggtttcagaggccagcgggaacggtggcctcgggtgtgtgggggtgaggggtgtggtgtgtgtgcacgtgttcacgcgcgact

SEQ ID NO: 13861 - DNA, 122 bp, Homo sapiens
  misc_feature (61)..(62): /note="This region represents a CpG dinucleotide"
  misc_feature (61)..(61): /note="Nucleotide may be methylated to form 5-methylcytosine"
aatgctgcagtcacaaaagcaggccggccccacacatatctttgcagtgctgggagccaccgctcgtggtcagcaaggtgatctcactgcacaaaactgattacaatcagaaatgctgccag

SEQ ID NO: 13862 - DNA, 122 bp, Homo sapiens
  misc_feature (61)..(62): /note="This region represents a CpG dinucleotide"
  misc_feature (61)..(61): /note="Nucleotide may be methylated to form 5-methylcytosine"
ggaatccagctaaccacctgtattgttaccaggtgttctgaagtgacaatgcaatctgttcgccagatataaaaggacaatcagagaggaagaacttgtcagcatttgtccagccctgctgg

SEQ ID NO: 13863 - DNA, 122 bp, Homo sapiens
  misc_feature (61)..(62): /note="This region represents a CpG dinucleotide"
  misc_feature (61)..(61): /note="Nucleotide may be methylated to form 5-methylcytosine"
tgccctaggcaagtgtgccattttaatcctttataccatatctttgctgcaccttttctacgtttagatatgtgtcacatgttacagttgcctggggtattcagtgcagcgtcatgctgtgt

SEQ ID NO: 13864 - DNA, 122 bp, Homo sapiens
  misc_feature (61)..(62): /note="This region represents a CpG dinucleotide"
  misc_feature (61)..(61): /note="Nucleotide may be methylated to form 5-methylcytosine"
atctgtgctgctgaatcaggcattccctgaggccagacctgcttctggacttttcagtcacgtgagccaagattatgttgtttaaactagcttgtgttgagttttctgttacttgtagccaa

SEQ ID NO: 13865 - DNA, 122 bp, Homo sapiens
  misc_feature (61)..(62): /note="This region represents a CpG dinucleotide"
  misc_feature (61)..(61): /note="Nucleotide may be methylated to form 5-methylcytosine"
ccacggggcccctggaggaacaaaaaccagctcccagccagcgcatgcacacctgagacacgccctcagccactggcttctgccactgctttactgggtcagccatgagtggggctgaggag

SEQ ID NO: 13866 - DNA, 122 bp, Homo sapiens
  misc_feature (61)..(62): /note="This region represents a CpG dinucleotide"
  misc_feature (61)..(61): /note="Nucleotide may be methylated to form 5-methylcytosine"
tacctctcgaggggttgtgaggattaaatgaaatgatattatatgagatatgacttagtacggtgagtaatctcttctaatgtattggttacataaatccagatttctatggatcagatgtt

SEQ ID NO: 13867 - DNA, 122 bp, Homo sapiens
  misc_feature (61)..(62): /note="This region represents a CpG dinucleotide"
  misc_feature (61)..(61): /note="Nucleotide may be methylated to form 5-methylcytosine"
atcaggtctcggtctctgtagaggaaatgtccttggtctagaaggctctgaaggcctttgcggtgagatgctgggtgatgcctgtgttaccttcataaatgcacattagtccctccagggca

SEQ ID NO: 13868 - DNA, 122 bp, Homo sapiens
  misc_feature (61)..(62): /note="This region represents a CpG dinucleotide"
  misc_feature (61)..(61): /note="Nucleotide may be methylated to form 5-methylcytosine"
tcatcacagaaagctacagtcacaagtcaaattaactactgtatcacaattatcatattacgctacatacaccttactgactcagaatgtaacgtttcagaagaaaaacaagactggttgtt

SEQ ID NO: 13869 - DNA, 122 bp, Homo sapiens
  misc_feature (61)..(62): /note="This region represents a CpG dinucleotide"
  misc_feature (61)..(61): /note="Nucleotide may be methylated to form 5-methylcytosine"
tgtttacttatagatgaactgtttaaatacatacattacataacacaaacatgtaagtgacgcaactgaaacagagcttcttctgtgtccttcctccagctcaatcagcaagcattgtccag

SEQ ID NO: 13870 - DNA, 122 bp, Homo sapiens
  misc_feature (61)..(62): /note="This region represents a CpG dinucleotide"
  misc_feature (61)..(61): /note="Nucleotide may be methylated to form 5-methylcytosine"
tggataaatggggagtcagccgtgacagctgccgcttgcaagtgtcttcattgtgccagtcgctcctcacacatcctttcatttaatcctcacattatgaggtgtaatgtctttaataagct

SEQ ID NO: 13871 - DNA, 122 bp, Homo sapiens
  misc_feature (61)..(62): /note="This region represents a CpG dinucleotide"
  misc_feature (61)..(61): /note="Nucleotide may be methylated to form 5-methylcytosine"
atgaccgaaggctgattacgggccttttcactccaatatcctaagttaactggtgccagccgcactcagggctgcctaattgcaatttagcccagaaaattcctcccatttttgccctccag

SEQ ID NO: 13872 - DNA, 122 bp, Homo sapiens
  misc_feature (61)..(62): /note="This region represents a CpG dinucleotide"
  misc_feature (61)..(61): /note="Nucleotide may be methylated to form 5-methylcytosine"
atgtatcaggaactttgcaacagaacaactaataacatcttaagctccatttgtctagctcgctagtcctcttggcagaggtcataccagcagtggttttgttgatttgctgcatcaaatgt

SEQ ID NO: 13873 - DNA, 122 bp, Homo sapiens
  misc_feature (61)..(62): /note="This region represents a CpG dinucleotide"
  misc_feature (61)..(61): /note="Nucleotide may be methylated to form 5-methylcytosine"
cgcaagactagcttagatgtttccaacagtgcagagccaggattcctggctcctggagcccgttctaacatccagtaccgcagcctgccccggccagccaagtcaagttctatgagcgtgac

SEQ ID NO: 13874 - DNA, 122 bp, Homo sapiens
  misc_feature (61)..(62): /note="This region represents a CpG dinucleotide"
  misc_feature (61)..(61): /note="Nucleotide may be methylated to form 5-methylcytosine"
cccacccagtactcattgagctgccgctgtgaaccctgcctgagctccccagtatgaacacgccttgctgacctggggctcctggccacaccctgagcaagtccaaatgcgcctgtgtacca

SEQ ID NO: 13875 - DNA, 122 bp, Homo sapiens
  misc_feature (61)..(62): /note="This region represents a CpG dinucleotide"
  misc_feature (61)..(61): /note="Nucleotide may be methylated to form 5-methylcytosine"
ctcagtcactggacatcttaggatcaccctatcatgaatcagagctcgaagcagggagagcggcaagaggttgagacttgctaatgttatgaggtacctgttgtatgccaggcacccactgg

SEQ ID NO: 13876 - DNA, 122 bp, Homo sapiens
  misc_feature (61)..(62): /note="This region represents a CpG dinucleotide"
  misc_feature (61)..(61): /note="Nucleotide may be methylated to form 5-methylcytosine"
ctgtatcacatgcctctgacaaactgaacaagaagccacaaggtctctgtgaccttttctcgcaaacttcctgtctctcaatcttctgtctgtcccaaagaacaggatgaagttgttctctg

SEQ ID NO: 13877 - DNA, 122 bp, Homo sapiens
  misc_feature (61)..(62): /note="This region represents a CpG dinucleotide"
  misc_feature (61)..(61): /note="Nucleotide may be methylated to form 5-methylcytosine"
gaatttactctagttgttctgaagattaaacaagaaaattcatgcaagatttaagtttaacgcctagcccagaaatgcccagcaattgttaactgagtgtagcagaaaaaaatagaatacca

SEQ ID NO: 13878 - DNA, 122 bp, Homo sapiens
  misc_feature (61)..(62): /note="This region represents a CpG dinucleotide"
  misc_feature (61)..(61): /note="Nucleotide may be methylated to form 5-methylcytosine"
gctctacttatatccacattgtcttgtgcaaggtagagagcaggcctagcaacctgggtgcggcaggattaattaagggcagctgaaaggcctatctgcacctatatatcttacttagctat

SEQ ID NO: 13879 - DNA, 122 bp, Homo sapiens
  misc_feature (61)..(62): /note="This region represents a CpG dinucleotide"
  misc_feature (61)..(61): /note="Nucleotide may be methylated to form 5-methylcytosine"
taaccctgggaggtaggtacaatcatccccattcacagaagacaaaatagacttgacaggcgaggtgaaccaacctgcccaaaggtcacaccactgggaggtagtaacgcccaatttcaagt

SEQ ID NO: 13880 - DNA, 122 bp, Homo sapiens
  misc_feature (61)..(62): /note="This region represents a CpG dinucleotide"
  misc_feature (61)..(61): /note="Nucleotide may be methylated to form 5-methylcytosine"
cctaagtgtcactttgctaaggcaatacaatggatttcaacaaagaaatattcgtttccacgtagtttgatactgaaagcagaaaactttctttttactgcatgcaggaaatggttttcata

SEQ ID NO: 13881 - DNA, 122 bp, Homo sapiens
  misc_feature (61)..(62): /note="This region represents a CpG dinucleotide"
  misc_feature (61)..(61): /note="Nucleotide may be methylated to form 5-methylcytosine"
tgggaatgtgctgggtctcacctgaagccagcatgtctgagtctcagccaaggcccatggcgtactacgtggttatcactgctagttattcagggcccaagggccctttagtcagcacagga

SEQ ID NO: 13882 - DNA, 122 bp, Homo sapiens
  misc_feature (61)..(62): /note="This region represents a CpG dinucleotide"
  misc_feature (61)..(61): /note="Nucleotide may be methylated to form 5-methylcytosine"
tacattagataaccccctaagactctgcagttgcctgattatgggccagtagcactgtagcgtaatattttacttgctctgtctcttatgtgactctaagcccagtgaaggaagaggccaca

SEQ ID NO: 13883 - DNA, 122 bp, Homo sapiens
  misc_feature (61)..(62): /note="This region represents a CpG dinucleotide"
  misc_feature (61)..(61): /note="Nucleotide may be methylated to form 5-methylcytosine"
tgtaaatctccctcttagctcttctgctattgagccttcactgctccaccttcagctctccgtctatgcaggcacactgtcacccactggtcatgtgaatgaaacctccaattacaccagga

SEQ ID NO: 13884 - DNA, 122 bp, Homo sapiens
  misc_feature (61)..(62): /note="This region represents a CpG dinucleotide"
  misc_feature (61)..(61): /note="Nucleotide may be methylated to form 5-methylcytosine"
gaagagagaacagacacggggcggctgagcagcagtgtgttcatggagaaagaatcaaagcgcacatcttgtactttgatgcccataggaagggctctcctctggcccctctggctttgttt

SEQ ID NO: 13885 - DNA, 122 bp, Homo sapiens
  misc_feature (61)..(62): /note="This region represents a CpG dinucleotide"
  misc_feature (61)..(61): /note="Nucleotide may be methylated to form 5-methylcytosine"
ctgatccaaatatgaagcaggtaagcttaggtcatccactcaaaccagactacgtctctgcgaagatctgctaagcttctgaaggttggagagacagacatggatgaaaagataaggccgcg

SEQ ID NO: 13886 - DNA, 122 bp, Homo sapiens
  misc_feature (61)..(62): /note="This region represents a CpG dinucleotide"
  misc_feature (61)..(61): /note="Nucleotide may be methylated to form 5-methylcytosine"
aacgacttcttcatctcccgctggagctcctcataagtgccctgtgcctctgccaggtaacgctcccagttctggttgacaggcaggtaggagacacccatctccagcatgccggccagagt

SEQ ID NO: 13887 - DNA, 122 bp, Homo sapiens
  misc_feature (61)..(62): /note="This region represents a CpG dinucleotide"
  misc_feature (61)..(61): /note="Nucleotide may be methylated to form 5-methylcytosine"
acaggttgccctgaagctgatgctcttgtctgcactgttgccatggagcccgtgcatatacgcttactaccagtgtggagcaatcatttcctattccattcagtacctttttatatcttgtg

SEQ ID NO: 13888 - DNA, 122 bp, Homo sapiens
  misc_feature (61)..(62): /note="This region represents a CpG dinucleotide"
  misc_feature (61)..(61): /note="Nucleotide may be methylated to form 5-methylcytosine"
gacccaaactttagtggcttaaaacaacatgtaattatgatctcacagtttccatgcttccgtgagttgtagaagtcatggaagcttgcttcttcaaagccagtaaaataatctctttcttc

SEQ ID NO: 13889 - DNA, 122 bp, Homo sapiens
  misc_feature (61)..(62): /note="This region represents a CpG dinucleotide"
  misc_feature (61)..(61): /note="Nucleotide may be methylated to form 5-methylcytosine"
ctgctggaggagttagctgccatgttattattcaacacctttatcacagtaagtatttaacgagcacagatcttggtgccagacagatcatgcttagtgctgctttatctacagcaactcag

SEQ ID NO: 13890 - DNA, 122 bp, Homo sapiens
  misc_feature (61)..(62): /note="This region represents a CpG dinucleotide"
  misc_feature (61)..(61): /note="Nucleotide may be methylated to form 5-methylcytosine"
tagattaccagggagctgtttataaataatagattttcattctaggctctctatatcttacgcagcataagcagttgaaattctagttagctaagggattcttaaagggaaagctctgaagt

SEQ ID NO: 13891 - DNA, 122 bp, Homo sapiens
  misc_feature (61)..(62): /note="This region represents a CpG dinucleotide"
  misc_feature (61)..(61): /note="Nucleotide may be methylated to form 5-methylcytosine"
aaagtcttaacccataggaacttactgatcacgaatgaattcattaagattaccatatggcgaatataagagttaatacctgagacttcactttttgcacaggttactaaaacctgactagg

SEQ ID NO: 13892 - DNA, 122 bp, Homo sapiens
  misc_feature (61)..(62): /note="This region represents a CpG dinucleotide"
  misc_feature (61)..(61): /note="Nucleotide may be methylated to form 5-methylcytosine"
acttgtggcacgcctaggacagtgcttggcattactcagtaagtgctcagtaaaccactgcgtgtgtgacatgtaagctgcacttgcttgaaaagggaccaaatgctcctggtgtcaacagg

SEQ ID NO: 13893 - DNA, 122 bp, Homo sapiens
  misc_feature (61)..(62): /note="This region represents a CpG dinucleotide"
  misc_feature (61)..(61): /note="Nucleotide may be methylated to form 5-methylcytosine"
cagacttggctgccagagcccttggttgctgagtttagtgatcagtcacagtaaccagttcgtcccaggtacatctggtgctcctaatagatgtctggcctggcatctgcttttatgttttg

SEQ ID NO: 13894 - DNA, 122 bp, Homo sapiens
  misc_feature (61)..(62): /note="This region represents a CpG dinucleotide"
  misc_feature (61)..(61): /note="Nucleotide may be methylated to form 5-methylcytosine"
aactgactgcagccacctttctgagaacacatgtggatgagcagcacagaaaatgttgcccgcaatctatggtaaaccatggctctgggtggcagcacgtgttggagtcagaaggagcaggg

SEQ ID NO: 13895 - DNA, 122 bp, Homo sapiens
  misc_feature (61)..(62): /note="This region represents a CpG dinucleotide"
  misc_feature (61)..(61): /note="Nucleotide may be methylated to form 5-methylcytosine"
cccataaatctggctgggccctgctgatcctgtttaccagattagtggactgggtgtctccgtataaatcacccagggtgatttacagggaggccctggaaatttcgaagtcccgactgact

SEQ ID NO: 13896 - DNA, 122 bp, Homo sapiens
  misc_feature (61)..(62): /note="This region represents a CpG dinucleotide"
  misc_feature (61)..(61): /note="Nucleotide may be methylated to form 5-methylcytosine"
cagaactgtacagcagctgccgaaagagttttgatgcctcagacctgtcatcttattttgcgtgtgtaataattacaggaacgaggatgtggacatgtactatcaattagtgttaagtaaaa

SEQ ID NO: 13897 - DNA, 122 bp, Homo sapiens
  misc_feature (61)..(62): /note="This region represents a CpG dinucleotide"
  misc_feature (61)..(61): /note="Nucleotide may be methylated to form 5-methylcytosine"
agggtattgaatcttgtgggggtgagtcaaacattcagaatctgaaggttatgaggtggacggagaacttggggagaatggaacagtcattcacaacacatgtactgtagacagctcaggca

SEQ ID NO: 13898 - DNA, 122 bp, Homo sapiens
  misc_feature (61)..(62): /note="This region represents a CpG dinucleotide"
  misc_feature (61)..(61): /note="Nucleotide may be methylated to form 5-methylcytosine"
tgtgtttatagtccttgttatagcacagatcacatgatattagggctccttgggctcccccgtgagctccaggaaggactgtcttagccacctccagaactccagcacaatgccaagcatat

SEQ ID NO: 13899 - DNA, 122 bp, Homo sapiens
  misc_feature (61)..(62): /note="This region represents a CpG dinucleotide"
  misc_feature (61)..(61): /note="Nucleotide may be methylated to form 5-methylcytosine"
cccagggaagctaaaagtttggacacccctggttagaccaaggttctcgacacaagcatgcgtcagggttatccagagagttagatgaaacacaggttcctgggctccagggtttctggtcc

SEQ ID NO: 13900 - DNA, 122 bp, Homo sapiens
  misc_feature (61)..(62): /note="This region represents a CpG dinucleotide"
  misc_feature (61)..(61): /note="Nucleotide may be methylated to form 5-methylcytosine"
tgtgtgagaagggagtgctggcctggaccatgactgtatgcactggtctgaccagacaatcgcttctcagtcttgcttagagtcagggattagcgttgtgtgccttttcccttgcttggtat

SEQ ID NO: 13901 - DNA, 122 bp, Homo sapiens
  misc_feature (61)..(62): /note="This region represents a CpG dinucleotide"
  misc_feature (61)..(61): /note="Nucleotide may be methylated to form 5-methylcytosine"
aggcagaaatctacagttaaattggttaaaaaataaagagatgcattatcttatagaaaacgtaatctgccccagggatggaagagcagatccctggctgcatttctctgtggccctcttgg

SEQ ID NO: 13902 - DNA, 122 bp, Homo sapiens
  misc_feature (61)..(62): /note="This region represents a CpG dinucleotide"
  misc_feature (61)..(61): /note="Nucleotide may be methylated to form 5-methylcytosine"
gagagccacttggccatgtacctcattggagagccacttggccacgtgcctaattagaagcgcacattctttgatccagcagatccacttctggaaatactggcatattttgtaatagcaaa

SEQ ID NO: 13903 - DNA, 122 bp, Homo sapiens
  misc_feature (61)..(62): /note="This region represents a CpG dinucleotide"
  misc_feature (61)..(61): /note="Nucleotide may be methylated to form 5-methylcytosine"
caaatacttttaagtcatggaccaaccttttgagtgtcttcctccagatggcattcataccgcatggtgacatcaccccaagtctaagcagggttcttgatgaagtcacagatgtgttgcaa

SEQ ID NO: 13904 - DNA, 122 bp, Homo sapiens
  misc_feature (61)..(62): /note="This region represents a CpG dinucleotide"
  misc_feature (61)..(61): /note="Nucleotide may be methylated to form 5-methylcytosine"
aggtactgtgatgctaatcatctctgtgggagcagttcctctctccagtacacctcagatcgcagtaaaaagtgacctcttgagattcttgagtatgttttgttgtgtttagtgcagtacca

SEQ ID NO: 13905 - DNA, 122 bp, Homo sapiens
  misc_feature (61)..(62): /note="This region represents a CpG dinucleotide"
  misc_feature (61)..(61): /note="Nucleotide may be methylated to form 5-methylcytosine"
ttaggtttgatctgatgaacaatggataatcactgcaggctcctcagcagggaagatatacgaaggaagaaaaggcatttaagtggattaatctagcccacgtgaacaactggttcaacgtg

SEQ ID NO: 13906 - DNA, 122 bp, Homo sapiens
  misc_feature (61)..(62): /note="This region represents a CpG dinucleotide"
  misc_feature (61)..(61): /note="Nucleotide may be methylated to form 5-methylcytosine"
gatgacaccaccaactgtaattactctccatgtgtgaaacggtggccgaggacactgaagcgtgacaagtggccagtctttcccacactgccgacattggaagattgctctttgatttatgt

SEQ ID NO: 13907 - DNA, 122 bp, Homo sapiens
  misc_feature (61)..(62): /note="This region represents a CpG dinucleotide"
  misc_feature (61)..(61): /note="Nucleotide may be methylated to form 5-methylcytosine"
ggggcctggaggaggcggctgccaatcttggggacatctgtgaaagcactgtggattctacgccgtgagaagaggaaacagcgtatattgagaatccactataagtaacacacctgtgaaca

SEQ ID NO: 13908 - DNA, 122 bp, Homo sapiens
  misc_feature (61)..(62): /note="This region represents a CpG dinucleotide"
  misc_feature (61)..(61): /note="Nucleotide may be methylated to form 5-methylcytosine"
ccagcaaatgtgccatcttcagccactggaggtcatctgctgaaatttcattgcccagttcgtatcagatgcaatcagaatttgtttgatgacaaaaacacttatcagctagtctgtcagtg

SEQ ID NO: 13909 - DNA, 122 bp, Homo sapiens
  misc_feature (61)..(62): /note="This region represents a CpG dinucleotide"
  misc_feature (61)..(61): /note="Nucleotide may be methylated to form 5-methylcytosine"
gaggtcattcttgtgctgttggaggaatgacctatgctcaggccaggtagtcacagatgccgtctgtctgctcgagtttcattcttttgtagtaagccttgggaagttgttcctctgggttg

SEQ ID NO: 13910 - DNA, 122 bp, Homo sapiens
  misc_feature (61)..(62): /note="This region represents a CpG dinucleotide"
  misc_feature (61)..(61): /note="Nucleotide may be methylated to form 5-methylcytosine"
tcattaatgcaattaaacttatccacaaggaatttgataatattagctcacattgtgtggcgctttactaggtctgcaaaaagctcttggaaggatcctgtaagaatgccaagcagggactc

SEQ ID NO: 13911 - DNA, 122 bp, Homo sapiens
  misc_feature (61)..(62): /note="This region represents a CpG dinucleotide"
  misc_feature (61)..(61): /note="Nucleotide may be methylated to form 5-methylcytosine"
cccaaattgctcaaagaaatgaaccctgaggtctccctctgactcaacactcccagatggcgcctacctcttcagaggcctctctctccccaactcagctataagcctcataaagccagaga

SEQ ID NO: 13912 - DNA, 122 bp, Homo sapiens
  misc_feature (61)..(62): /note="This region represents a CpG dinucleotide"
  misc_feature (61)..(61): /note="Nucleotide may be methylated to form 5-methylcytosine"
accatcccctgtgccctgataaatcaaccaacagttgttttggtagccccagataagcagcgggaagagctgacttcctcttagaaaatgactcctttgtatttctggcaaaacagcttggg

SEQ ID NO: 13913 - DNA, 122 bp, Homo sapiens
  misc_feature (61)..(62): /note="This region represents a CpG dinucleotide"
  misc_feature (61)..(61): /note="Nucleotide may be methylated to form 5-methylcytosine"
atcgacctactaagtatgaagctgggcacagaagaatgggtgacatggctcctggcttggcggaggccagtaaaagcttccaggtaaaacacccttgaggagcatgggctcaagggtgccag

SEQ ID NO: 13914 - DNA, 122 bp, Homo sapiens
  misc_feature (61)..(62): /note="This region represents a CpG dinucleotide"
  misc_feature (61)..(61): /note="Nucleotide may be methylated to form 5-methylcytosine"
cgctgggtactggcgacaggaagggttggcccaaagtggctggcggagcttaatctggggcggcccagggagcctcctggctggtggagggacagagcaccatcatccgggctggcctccgc

SEQ ID NO: 13915 - DNA, 122 bp, Homo sapiens
  misc_feature (61)..(62): /note="This region represents a CpG dinucleotide"
  misc_feature (61)..(61): /note="Nucleotide may be methylated to form 5-methylcytosine"
gcatatttggagatgacctcatccagccgactcatggccaaactccggttttcccgaaggcgccgggccaacacaggatctgatagtgcagggtcaacgcctacgtgggaagacataaagtc

SEQ ID NO: 13916 - DNA, 122 bp, Homo sapiens
  misc_feature (61)..(62): /note="This region represents a CpG dinucleotide"
  misc_feature (61)..(61): /note="Nucleotide may be methylated to form 5-methylcytosine"
gaggattagatgagataatgtgcattaactgcccagcacagggtaactgctcagctccagcgaaagacttgcaggttcagtgcaagctgtgctttgccccatggttcccctccctctgcccc

SEQ ID NO: 13917 - DNA, 122 bp, Homo sapiens
  misc_feature (61)..(62): /note="This region represents a CpG dinucleotide"
  misc_feature (61)..(61): /note="Nucleotide may be methylated to form 5-methylcytosine"
cgagggtggggcagccattccatctttcaatgttgatggaaggcatccttggacagctcccgcccctttcacgctgccccagccagcctgagcatcagtcatgagcaaatcaccaactccca

SEQ ID NO: 13918 - DNA, 122 bp, Homo sapiens
  misc_feature (61)..(62): /note="This region represents a CpG dinucleotide"
  misc_feature (61)..(61): /note="Nucleotide may be methylated to form 5-methylcytosine"
ccccctccagagcaagtacttcaatccctggccctagactaaaatgcctgcatggccacacggctgggtcaccaaagaatggttgactttgtatttgtctggatttaaaagagtatcctcct

SEQ ID NO: 13919 - DNA, 122 bp, Homo sapiens
  misc_feature (61)..(62): /note="This region represents a CpG dinucleotide"
  misc_feature (61)..(61): /note="Nucleotide may be methylated to form 5-methylcytosine"
tccttttggtaatggagataatgaatgactgcacaaacaagaaggattgctcatcactgacgccagtgtggcttcaaactggaaaaggcctggagtacaaattttaatggactgaaaacact

SEQ ID NO: 13920 - DNA, 122 bp, Homo sapiens
  misc_feature (61)..(62): /note="This region represents a CpG dinucleotide"
  misc_feature (61)..(61): /note="Nucleotide may be methylated to form 5-methylcytosine"
tttctcaagcctactaaattccaagctttctaaaatcttcattgatgcctcaggccacaccgagcaggttctaactccccactaagaatgactataatgggcctggcacatgccctgtaacc

SEQ ID NO: 13921 - DNA, 122 bp, Homo sapiens
  misc_feature (61)..(62): /note="This region represents a CpG dinucleotide"
  misc_feature (61)..(61): /note="Nucleotide may be methylated to form 5-methylcytosine"
acatgtagatggcgtagtataactacaagccaactgccaactatgatctcagcaagatgacgacacctaacacatcactaattctgatttgaacaaaccatggtaaaacattacatcctgca

SEQ ID NO: 13922 - DNA, 122 bp, Homo sapiens
  misc_feature (61)..(62): /note="This region represents a CpG dinucleotide"
  misc_feature (61)..(61): /note="Nucleotide may be methylated to form 5-methylcytosine"
gggagcagggatgagcaacagaggtcatgatttggcaacagcaatggctgaaagtttaatcgtttgttcatgagagttttattctggttttagttttttattttgttttgctggctgaggca

SEQ ID NO: 13923 - DNA, 122 bp, Homo sapiens
  misc_feature (61)..(62): /note="This region represents a CpG dinucleotide"
  misc_feature (61)..(61): /note="Nucleotide may be methylated to form 5-methylcytosine"
tgaagtccttacaccctcaaaagcagccaagcacaggtggttttagccacatttttatgacgaaactaagttttacaggttagatgagctttgaaggggcacctggttgataaacggtagat

SEQ ID NO: 13924 - DNA, 122 bp, Homo sapiens
  misc_feature (61)..(62): /note="This region represents a CpG dinucleotide"
  misc_feature (61)..(61): /note="Nucleotide may be methylated to form 5-methylcytosine"
cggtggacctgggtttacatcaaggctatgcactcaccagctgggagactttggagagatcgcacagtcttgctggtctcagcttccttactcataatttggggatagaaccatgtcccaca

SEQ ID NO: 13925 - DNA, 122 bp, Homo sapiens
  misc_feature (61)..(62): /note="This region represents a CpG dinucleotide"
  misc_feature (61)..(61): /note="Nucleotide may be methylated to form 5-methylcytosine"
gctgccaggtcatttgccaactgagtcaccttatctagctttgcagttgcttcatgcaagcgctcttcatatagagtacagagtttctcagcatttgcctataagttgagaaagaagggctg

SEQ ID NO: 13926 - DNA, 122 bp, Homo sapiens
  misc_feature (61)..(62): /note="This region represents a CpG dinucleotide"
  misc_feature (61)..(61): /note="Nucleotide may be methylated to form 5-methylcytosine"
gcagcttaatattttttcctgattatgaaagtcaccaagttcacctctcacctggacacacgtaccagctcctggagtgatctaagaatgtcatcttgcacagccggtgactgctgcagaca

SEQ ID NO: 13927 - DNA, 122 bp, Homo sapiens
  misc_feature (61)..(62): /note="This region represents a CpG dinucleotide"
  misc_feature (61)..(61): /note="Nucleotide may be methylated to form 5-methylcytosine"
ccccctcccggaaggctacctgaacacataaatgagcgggcttaattgttcatgagcaaccggtgttgtcaggcaagtccctctggcctcttcagaatcccagtaagtttaagactaaatag

SEQ ID NO: 13928 - DNA, 122 bp, Homo sapiens
  misc_feature (61)..(62): /note="This region represents a CpG dinucleotide"
  misc_feature (61)..(61): /note="Nucleotide may be methylated to form 5-methylcytosine"
tagcactaggaagggccttgagcacacatgtgtgggcactcagctcacatgtgcaagctccgcagtgccctcaagccacccctggtcaccacccgaggcctatgggtgtgcacaccagtaat

SEQ ID NO: 13929 - DNA, 122 bp, Homo sapiens
  misc_feature (61)..(62): /note="This region represents a CpG dinucleotide"
  misc_feature (61)..(61): /note="Nucleotide may be methylated to form 5-methylcytosine"
gtctctctcgtgcatatgtgtctgtgggtctccctgtgggttctccccagcctctctccgcgccagctcttttaagcatggtgagcctctgcgattgattggctgatctctaagccactcag

SEQ ID NO: 13930 - DNA, 122 bp, Homo sapiens
  misc_feature (61)..(62): /note="This region represents a CpG dinucleotide"
  misc_feature (61)..(61): /note="Nucleotide may be methylated to form 5-methylcytosine"
gccctgacaccctgacactggacatttctgggtgggtcataagaagtcacagcctgaggccgggcacggtggctcaggcctgtaatcccagcacttcgggaaggtgaggcaggagggtcact

SEQ ID NO: 13931 - DNA, 122 bp, Homo sapiens
  misc_feature (61)..(62): /note="This region represents a CpG dinucleotide"
  misc_feature (61)..(61): /note="Nucleotide may be methylated to form 5-methylcytosine"
tcaggagagcccatcagctgctcactaatgtgaagtcacagtcaagtgtggggactgagtcggatgaggctgacttctaggcagcttgtctgacaacaggttatgcagtgtatctaaggaca

SEQ ID NO: 13932 - DNA, 122 bp, Homo sapiens
  misc_feature (61)..(62): /note="This region represents a CpG dinucleotide"
  misc_feature (61)..(61): /note="Nucleotide may be methylated to form 5-methylcytosine"
gagttctctgcaggaataaataagcctcagcattcatgaaaatccactactccagacagacggctttggaatccaccagctacatccagctccctgaggcaggtaatccatgatgttttaca

SEQ ID NO: 13933 - DNA, 122 bp, Homo sapiens
  misc_feature (61)..(62): /note="This region represents a CpG dinucleotide"
  misc_feature (61)..(61): /note="Nucleotide may be methylated to form 5-methylcytosine"
ttaagacctaaatcaaggtctaacttttgcttgtccaagtgccagccggaagaacagctccgtgaagccagctaaccaaccaaccaaaaccctgctgctgccccagggccagagaagccata

SEQ ID NO: 13934 - DNA, 122 bp, Homo sapiens
  misc_feature (61)..(62): /note="This region represents a CpG dinucleotide"
  misc_feature (61)..(61): /note="Nucleotide may be methylated to form 5-methylcytosine"
gcacttggtaactaacatgcttacagtcatgcagagacatagttttttgtgaagggaacacgcaatattttagagagggtgatccttgttatattgttagccataaattttgcctacattat

SEQ ID NO: 13935 - DNA, 122 bp, Homo sapiens
  misc_feature (61)..(62): /note="This region represents a CpG dinucleotide"
  misc_feature (61)..(61): /note="Nucleotide may be methylated to form 5-methylcytosine"
cacattctttccttgtgcatatgctacatccgccaaggtagactgcatgctgggccataacgcacattttgataaatgtgaaaggattgagatcataccaggaaaaacaaaggaagaagtca

SEQ ID NO: 13936 - DNA, 122 bp, Homo sapiens
  misc_feature (61)..(62): /note="This region represents a CpG dinucleotide"
  misc_feature (61)..(61): /note="Nucleotide may be methylated to form 5-methylcytosine"
taccaggcagctttctgcttgatttggtatctttatagctgattgcctctattgcaaaagcgtaatttgaagcctcagccaggccctggttgctgcaagatgattacttgactcaatctaga

SEQ ID NO: 13937 - DNA, 122 bp, Homo sapiens
  misc_feature (61)..(62): /note="This region represents a CpG dinucleotide"
  misc_feature (61)..(61): /note="Nucleotide may be methylated to form 5-methylcytosine"
tctgaagcacatgcgcaggggagtatgctgcagggtgaggtggagagccagggaagggcccggtagtgcaaggccaagtggctagtttaaagattttatcctttggcctgagagcaattgag

SEQ ID NO: 13938 - DNA, 122 bp, Homo sapiens
  misc_feature (61)..(62): /note="This region represents a CpG dinucleotide"
  misc_feature (61)..(61): /note="Nucleotide may be methylated to form 5-methylcytosine"
ctgatggctgggaccccatctctgatggagcaaggcttctgatacccaactgaggcttggcgccaaggactgacatcaaggaagtggattcctgcaaacctggcacccgagggtccacttcc

SEQ ID NO: 13939 - DNA, 122 bp, Homo sapiens
  misc_feature (61)..(62): /note="This region represents a CpG dinucleotide"
  misc_feature (61)..(61): /note="Nucleotide may be methylated to form 5-methylcytosine"
ttgtggtttgaatgtttgtctccacaaattcatatggtgaaaccctaccctccaggtgatcgtactagaaggtggggcctttgggaggtgattaggtcacgagggtggagccgcatgaaaag

SEQ ID NO: 13940 - DNA, 122 bp, Homo sapiens
  misc_feature (61)..(62): /note="This region represents a CpG dinucleotide"
  misc_feature (61)..(61): /note="Nucleotide may be methylated to form 5-methylcytosine"
gcctaaatttcaagcttgtgaaatgatgagtctccttaattgctcctaagttcattaagacgtaaaacattcagcattttgcaccttatgaagagataaacagaaaataaaagtcaaattac

SEQ ID NO: 13941 - DNA, 122 bp, Homo sapiens
  misc_feature (61)..(62): /note="This region represents a CpG dinucleotide"
  misc_feature (61)..(61): /note="Nucleotide may be methylated to form 5-methylcytosine"
ctctgtctcaaaaaaaaaaaaagtgaatggctgactctagccaaagtttaacccatgtgacggggaagcaagttaaggtaagtcaggccccatagaataacacctcatatgtggtaacaact

SEQ ID NO: 13942 - DNA, 122 bp, Homo sapiens
  misc_feature (61)..(62): /note="This region represents a CpG dinucleotide"
  misc_feature (61)..(61): /note="Nucleotide may be methylated to form 5-methylcytosine"
gctgtaaaaccggatgcctctcctaagccgactctagtggaacagcaactacagatgccacgtaatcatagagtaacaaggctagaagttaccacctcaaggataaacacaacctcttcatc

SEQ ID NO: 13943 - DNA, 122 bp, Homo sapiens
  misc_feature (61)..(62): /note="This region represents a CpG dinucleotide"
  misc_feature (61)..(61): /note="Nucleotide may be methylated to form 5-methylcytosine"
gcctgactcctgccatttaatggtaattaaaataaaatgatgggccggcaccgtggctcacgcctattaatcttggcactatgtgaggcctgaggcaggcttaagcctaggagtttgagacc

SEQ ID NO: 13944 - DNA, 122 bp, Homo sapiens
  misc_feature (61)..(62): /note="This region represents a CpG dinucleotide"
  misc_feature (61)..(61): /note="Nucleotide may be methylated to form 5-methylcytosine"
attacactttgaagcttatgcctctgactgccacatgaagcagaactgtgagtccatgagcgtggtactgggaagtaggcttgtaaaagctgggtggggccagctgaggaggctctgaaatg

SEQ ID NO: 13945 - DNA, 122 bp, Homo sapiens
  misc_feature (61)..(62): /note="This region represents a CpG dinucleotide"
  misc_feature (61)..(61): /note="Nucleotide may be methylated to form 5-methylcytosine"
taaataaaataagtaaaggaaaataagttgcatgatgtattgcagagatatatcacaccccggcaaatggggaactgaaaccctccagcagaagcacttagcacacttcatttgattcccat

SEQ ID NO: 13946 - DNA, 122 bp, Homo sapiens
  misc_feature (61)..(62): /note="This region represents a CpG dinucleotide"
  misc_feature (61)..(61): /note="Nucleotide may be methylated to form 5-methylcytosine"
cccaaattagtcatgtaaatttactgaaggccaacagtagcagaaacttgtcaacaagaccgaggaagcaaaggaaggcagcatctttacatttttagtgtttataacacttcaaaagccta

SEQ ID NO: 13947 - DNA, 122 bp, Homo sapiens
  misc_feature (61)..(62): /note="This region represents a CpG dinucleotide"
  misc_feature (61)..(61): /note="Nucleotide may be methylated to form 5-methylcytosine"
aaacaaagttttaatcacctttgcccatccacacaagtcttaagtaagagtttacccaagcgtgagtcctacaggttattgtgactgtttactctttgaaagagtaaaataaatcaacactc

SEQ ID NO: 13948 - DNA, 122 bp, Homo sapiens
  misc_feature (61)..(62): /note="This region represents a CpG dinucleotide"
  misc_feature (61)..(61): /note="Nucleotide may be methylated to form 5-methylcytosine"
attccaatgccagttcagttttcaaagtctttgtagtgctattgagatctgacctatgtgcgtgcagcccagtagtcagtctgggaccttggtagcagtctggtcattacttcagttcttac

SEQ ID NO: 13949 - DNA, 122 bp, Homo sapiens
  misc_feature (61)..(62): /note="This region represents a CpG dinucleotide"
  misc_feature (61)..(61): /note="Nucleotide may be methylated to form 5-methylcytosine"
gcaaaccaatttctatttgctgactattctccagggcttttaaaagcaaataaaatgtaccggaaactgttttccaaatgacaacaaagaatacatctcctactctctcttctcccccaaca

SEQ ID NO: 13950 - DNA, 122 bp, Homo sapiens
  misc_feature (61)..(62): /note="This region represents a CpG dinucleotide"
  misc_feature (61)..(61): /note="Nucleotide may be methylated to form 5-methylcytosine"
cagatgcgggctaggttgcagagaaaaaggaatgcttatatgttgtgggaatcaggaggccggagagatcactgggtgcaacaggaaggttttatttaggtggccactggcccagcggatta

SEQ ID NO: 13951 - DNA, 122 bp, Homo sapiens
  misc_feature (61)..(62): /note="This region represents a CpG dinucleotide"
  misc_feature (61)..(61): /note="Nucleotide may be methylated to form 5-methylcytosine"
gtggggtccctggttctagagggagcaaagcagaccttatttgcaaattattgtgtagatcggttttaacctgtctgtacgtgaaggactggcacaaaatgctcacctctgtttgcctaact

SEQ ID NO: 13952 - DNA, 122 bp, Homo sapiens
  misc_feature (61)..(62): /note="This region represents a CpG dinucleotide"
  misc_feature (61)..(61): /note="Nucleotide may be methylated to form 5-methylcytosine"
ctgtccactactcagtgggaatcagaatggaagaaggttaggaataaaggaaaaagcagacggtataaaagtgcacagagcagatggacttcagattcagacaaaccaggtttgactcctga

SEQ ID NO: 13953 - DNA, 122 bp, Homo sapiens
  misc_feature (61)..(62): /note="This region represents a CpG dinucleotide"
  misc_feature (61)..(61): /note="Nucleotide may be methylated to form 5-methylcytosine"
acacccggcctggaatgctgtctattgaggaaaggaagaggctgtactggggagtgccagcgttgaagttcaagcaagtgtaaaactctggccttaactgaatcacaagtaggaaacaagtt

SEQ ID NO: 13954 - DNA, 122 bp, Homo sapiens
  misc_feature (61)..(62): /note="This region represents a CpG dinucleotide"
  misc_feature (61)..(61): /note="Nucleotide may be methylated to form 5-methylcytosine"
gacacttgaacctctgcagatctcgaagatgctaaaatggaccacgcggtcctgaccacccgcccccggcccctcaacaaactcacgctatttctcagttcctgcatatcacacacaatatt

SEQ ID NO: 13955 - DNA, 122 bp, Homo sapiens
  misc_feature (61)..(62): /note="This region represents a CpG dinucleotide"
  misc_feature (61)..(61): /note="Nucleotide may be methylated to form 5-methylcytosine"
ttccttcagcactatttcctggactgttctgtgattgtttctcttgcttcacaaacctgccgtataaaggatgtggtaatccctggaggtgaacttgcaaaatagactccagggctgccaga

SEQ ID NO: 13956 - DNA, 122 bp, Homo sapiens
  misc_feature (61)..(62): /note="This region represents a CpG dinucleotide"
  misc_feature (61)..(61): /note="Nucleotide may be methylated to form 5-methylcytosine"
tccctctggccctgaagccctgggcttgatatgacctcaaggcacccagacctgtcctcacgcgggccgtcctcccgtctcccaggaagtggcagtgagatttagtggttgacaggatgctg

SEQ ID NO: 13957 - DNA, 122 bp, Homo sapiens
  misc_feature (61)..(62): /note="This region represents a CpG dinucleotide"
  misc_feature (61)..(61): /note="Nucleotide may be methylated to form 5-methylcytosine"
tgggttacaaattacaggtgtcagtgccttctctcaaatccaccaaatgctggaaaatgccgctctcagacagactatttcctaaaaggggactattcaggatagttttccatttaaacata

SEQ ID NO: 13958 - DNA, 122 bp, Homo sapiens
  misc_feature (61)..(62): /note="This region represents a CpG dinucleotide"
  misc_feature (61)..(61): /note="Nucleotide may be methylated to form 5-methylcytosine"
agtttctcaatgccctttgggacttcctcctcatttctgatctataggacatgtctgcaccgctaattggcattgttagtttattgccacaggatcatctcaccctatgagagactttgccc

SEQ ID NO: 13959 - DNA, 122 bp, Homo sapiens
  misc_feature (61)..(62): /note="This region represents a CpG dinucleotide"
  misc_feature (61)..(61): /note="Nucleotide may be methylated to form 5-methylcytosine"
gaggcagagagggaaaagttccatgttgatcccaggggacaattccttaccttccttgttcgcctgatagtcaagtgagaaatggcttgcatgacaagatactgcatggaaaaagcctgggc

SEQ ID NO: 13960 - DNA, 122 bp, Homo sapiens
  misc_feature (61)..(62): /note="This region represents a CpG dinucleotide"
  misc_feature (61)..(61): /note="Nucleotide may be methylated to form 5-methylcytosine"
atgtcctaggccgttgagattcccatctctgtaatatcagcaaccatactgtattgagaacgtaatactgataacactctactggcagtaacatgtgcatgaataattgtcttcttccttac

SEQ ID NO: 13961 - DNA, 122 bp, Homo sapiens
  misc_feature (61)..(62): /note="This region represents a CpG dinucleotide"
  misc_feature (61)..(61): /note="Nucleotide may be methylated to form 5-methylcytosine"
ctattgagtgagcttagttcattgctaaatatcttcatctcaacacagcttcattgttctcggcctattcaagtgtgaaatctcagtagtgaaatcttatgaaagggccacttaatttccat

SEQ ID NO: 13962 - DNA, 122 bp, Homo sapiens
  misc_feature (61)..(62): /note="This region represents a CpG dinucleotide"
  misc_feature (61)..(61): /note="Nucleotide may be methylated to form 5-methylcytosine"
tgcactttaaccttgttctttacctgctctgaagcctttcttgcattttaatgacaagaacggtgtattttgcctttcagtgagtttgttaattatggagatcaaactctgcctttcattac

SEQ ID NO: 13963 - DNA, 122 bp, Homo sapiens
  misc_feature (61)..(62): /note="This region represents a CpG dinucleotide"
  misc_feature (61)..(61): /note="Nucleotide may be methylated to form 5-methylcytosine"
tcacccaatctttaaacacatcataaaaatttgctgtgctggggagtgtcataaagtcctcgttagctgaaaggcactcaggggttctgaccgtacccctgcatcctctgcagagcttcctt

SEQ ID NO: 13964 - DNA, 122 bp, Homo sapiens
  misc_feature (61)..(62): /note="This region represents a CpG dinucleotide"
  misc_feature (61)..(61): /note="Nucleotide may be methylated to form 5-methylcytosine"
gcagatcttggcaagaagtgctagaatttacagggtttgatgcagagtccagagtgaggacgggaagctatgactaaaactctgcccaaggcactaagaaaggcttgactaagaaggaattc

SEQ ID NO: 13965 - DNA, 122 bp, Homo sapiens
  misc_feature (61)..(62): /note="This region represents a CpG dinucleotide"
  misc_feature (61)..(61): /note="Nucleotide may be methylated to form 5-methylcytosine"
gttcactgcactcctgatccagcgaggcgcccactgccactccctatcaggctaaaggcacgccattgttcctgcatgactaagggcccaggatttgtcctaatcgagctgaacactagttg

SEQ ID NO: 13966 - DNA, 122 bp, Homo sapiens
  misc_feature (61)..(62): /note="This region represents a CpG dinucleotide"
  misc_feature (61)..(61): /note="Nucleotide may be methylated to form 5-methylcytosine"
caacaaactatacatattgtagcctcaggcattcagaaagactggtctctttccaaatcccgctttcaaaaatctcagagaagacaatgactcgctcagcattgattgtgaggcctctgcag

SEQ ID NO: 13967 - DNA, 122 bp, Homo sapiens
  misc_feature (61)..(62): /note="This region represents a CpG dinucleotide"
  misc_feature (61)..(61): /note="Nucleotide may be methylated to form 5-methylcytosine"
cagggagaagccaaccctccaccagcccaggagagaggcctcaggggaaaccaaccctgacgaccccttgatctcagactcacagccccaaagactgtgaggagaccagtctctgttgttca

SEQ ID NO: 13968 - DNA, 122 bp, Homo sapiens
  misc_feature (61)..(62): /note="This region represents a CpG dinucleotide"
  misc_feature (61)..(61): /note="Nucleotide may be methylated to form 5-methylcytosine"
tctctaatgcttactcagtatactcatatgaaaaatgagggcaatccctaagctacttcacgggactatcaggagacttaaataagacaatgtgagggactgggcgcggtggctcatggctg

SEQ ID NO: 13969 - DNA, 122 bp, Homo sapiens
  misc_feature (61)..(62): /note="This region represents a CpG dinucleotide"
  misc_feature (61)..(61): /note="Nucleotide may be methylated to form 5-methylcytosine"
ctacaatggctgagtcaggtatcccagggatctgtgacgagggagctggggcatgggtgtcggaccaaagacgcctaagtttgaatcccagctgtgagcttgggcaagctcctcaacctctc

SEQ ID NO: 13970 - DNA, 122 bp, Homo sapiens
  misc_feature (61)..(62): /note="This region represents a CpG dinucleotide"
  misc_feature (61)..(61): /note="Nucleotide may be methylated to form 5-methylcytosine"
ggacatttgggaccttgtatgggaggagtcagtaaaaagccattcaagtgaaaggcaaaccggaagagagtgtcatcatgaacctaagccaggatgtttttttaggatgaagggtgtggtca

SEQ ID NO: 13971 - DNA, 122 bp, Homo sapiens
  misc_feature (61)..(62): /note="This region represents a CpG dinucleotide"
  misc_feature (61)..(61): /note="Nucleotide may be methylated to form 5-methylcytosine"
gctcctcagcatgcaacgttggacaccctccagcatcttatccatggggctggccagacccggcgtgctctctcgtgttatgtacagggaatgccaagtgtctgaatgcactggatcaactt

SEQ ID NO: 13972 - DNA, 122 bp, Homo sapiens
  misc_feature (61)..(62): /note="This region represents a CpG dinucleotide"
  misc_feature (61)..(61): /note="Nucleotide may be methylated to form 5-methylcytosine"
ctggtgggatacagcatcccgcagccatgtcttagtttcctctgtctccagggacttgaacgagcctcctcaacttccttcatccctaacccaggttgcatggtaacataaaagatcaaaat

SEQ ID NO: 13973 - DNA, 122 bp, Homo sapiens
  misc_feature (61)..(62): /note="This region represents a CpG dinucleotide"
  misc_feature (61)..(61): /note="Nucleotide may be methylated to form 5-methylcytosine"
ggaaagttattaagggaagtcattccaggacagttttcacccactcagtagattacaggacgccatggaagaactgaactacctcggtaggctgcacctcaggctctgtgcagactaatgtt

SEQ ID NO: 13974 - DNA, 122 bp, Homo sapiens
  misc_feature (61)..(62): /note="This region represents a CpG dinucleotide"
  misc_feature (61)..(61): /note="Nucleotide may be methylated to form 5-methylcytosine"
aaatcgaaaggcttaaatcagaggtatttcccagtcaatagattccttctcattgtttcacgtttaccgtcatttcctcatgattacttaaggcctattcagggcaacattttaatcccagg

SEQ ID NO: 13975 - DNA, 122 bp, Homo sapiens
  misc_feature (61)..(62): /note="This region represents a CpG dinucleotide"
  misc_feature (61)..(61): /note="Nucleotide may be methylated to form 5-methylcytosine"
gactgggcagcaggactgtcctgccagcttgtcaggtctcactgaggctttgagggtgggcgcaggggctgtgctgggccctaccctcagagggaccccaccctccccatggcctacctggc

SEQ ID NO: 13976 - DNA, 122 bp, Homo sapiens
  misc_feature (61)..(62): /note="This region represents a CpG dinucleotide"
  misc_feature (61)..(61): /note="Nucleotide may be methylated to form 5-methylcytosine"
aaaggaatgtggatgagcagagcaggcgccactgtagggcttggctgtggaattctcaagcgtgaacgactcagtgctttgagtgccatccacaatctgttgcagtaattatgaccttggct

SEQ ID NO: 13977 - DNA, 122 bp, Homo sapiens
  misc_feature (61)..(62): /note="This region represents a CpG dinucleotide"
  misc_feature (61)..(61): /note="Nucleotide may be methylated to form 5-methylcytosine"
cactttaggactgcaacaggattatagaactccagagacacatttcacagtcaacaactacgtaaacagaatccactggagttgtgcagcatgcaacctgtgcagctggtcatggtgtccct

SEQ ID NO: 13978 - DNA, 122 bp, Homo sapiens
  misc_feature (61)..(62): /note="This region represents a CpG dinucleotide"
  misc_feature (61)..(61): /note="Nucleotide may be methylated to form 5-methylcytosine"
tcaggtggcatttaatccttcataaaaccagtgtagcctgcagtgtcaaaccagcaatcacgttgtatgcgcaatgaaaagagcaggcctttgcataaaaaaaaattgtacagaaggtgttt

SEQ ID NO: 13979 - DNA, 122 bp, Homo sapiens
  misc_feature (61)..(62): /note="This region represents a CpG dinucleotide"
  misc_feature (61)..(61): /note="Nucleotide may be methylated to form 5-methylcytosine"
ggggttaggaacctgagacggccagagagccggatgccacgtctgctctgaccaagatgacgtcccaaccacctgccctcggggcgtcagctggcacagatggcctagccctgtcaatacag

SEQ ID NO: 13980 - DNA, 122 bp, Homo sapiens
  misc_feature (61)..(62): /note="This region represents a CpG dinucleotide"
  misc_feature (61)..(61): /note="Nucleotide may be methylated to form 5-methylcytosine"
ccagacacttctccactctgagccaagtgctaacccaaacagttcatgactcaacagctacgtagtctatccacccattcatgtgacattgtgaaggcgacactgccacaagccacaaccaa

SEQ ID NO: 13981 - DNA, 122 bp, Homo sapiens
  misc_feature (61)..(62): /note="This region represents a CpG dinucleotide"
  misc_feature (61)..(61): /note="Nucleotide may be methylated to form 5-methylcytosine"
tcctactcagcctgcctttctccttcactgggagtcagggttgccagatgcaacacaggacgcccaggaaaatctgaatactagataaacaaagaattattcgtgtaagtatggctcaaaca

SEQ ID NO: 13982 - DNA, 122 bp, Homo sapiens
  misc_feature (61)..(62): /note="This region represents a CpG dinucleotide"
  misc_feature (61)..(61): /note="Nucleotide may be methylated to form 5-methylcytosine"
caccctcctcctggagctgatggtgaggccaggaaacagtgtctctttgtgaccaaagcacggtcactttgaagtcacagccccactactgtgtggccaaggctctaccatgttccctctct

SEQ ID NO: 13983 - DNA, 122 bp, Homo sapiens
  misc_feature (61)..(62): /note="This region represents a CpG dinucleotide"
  misc_feature (61)..(61): /note="Nucleotide may be methylated to form 5-methylcytosine"
tgcagctcaccacggccaactgtgtgacatagtaacagttaacctccactgactggtcaccgtgctccaggcactgtcttaagtggcttgtattcattcctttaatcctcataacaccctga

SEQ ID NO: 13984 - DNA, 122 bp, Homo sapiens
  misc_feature (61)..(62): /note="This region represents a CpG dinucleotide"
  misc_feature (61)..(61): /note="Nucleotide may be methylated to form 5-methylcytosine"
gctgaataattaatgccagctctgataatcctgcctgacttaaaaatggttcattattaccgataacaaccatgacaatttactgagagctcactgcctgccctaagtcctttttctgtcat

SEQ ID NO: 13985 - DNA, 122 bp, Homo sapiens
  misc_feature (61)..(62): /note="This region represents a CpG dinucleotide"
  misc_feature (61)..(61): /note="Nucleotide may be methylated to form 5-methylcytosine"
ccctaggagaagtacacgtaactactagagtgtgtaatagacagaactgacctgtcagggcggccaggctttcctaaggaagtgtgattaagccgagcaggaggaaactaggcagtggttgt

SEQ ID NO: 13986 - DNA, 122 bp, Homo sapiens
  misc_feature (61)..(62): /note="This region represents a CpG dinucleotide"
  misc_feature (61)..(61): /note="Nucleotide may be methylated to form 5-methylcytosine"
acaaccggcctaatttaacctaaatccagaaataatcccttaaattttgtagctcacaaacgcatcctccctctttccccacaacattccatcagactcagggaacgtcatcacacatcaac

SEQ ID NO: 13987 - DNA, 122 bp, Homo sapiens
  misc_feature (61)..(62): /note="This region represents a CpG dinucleotide"
  misc_feature (61)..(61): /note="Nucleotide may be methylated to form 5-methylcytosine"
acacatcaagaaacacgtttcgcaggtacatctgaggtacaccacagcacatgaggcatgcggaacagaaatccatatggaaagtggcaatctatgacttccggaaggataaggtaaacctc

SEQ ID NO: 13988 - DNA, 122 bp, Homo sapiens
  misc_feature (61)..(62): /note="This region represents a CpG dinucleotide"
  misc_feature (61)..(61): /note="Nucleotide may be methylated to form 5-methylcytosine"
tgccaacaactccatgagggaactgtggttacacaggctcagggcttgcccgaggttcgccgggagccgaggtcctcagtcaggcctgtcagactctgaagcctgtgacctttctgctccac

SEQ ID NO: 13989 - DNA, 122 bp, Homo sapiens
  misc_feature (61)..(62): /note="This region represents a CpG dinucleotide"
  misc_feature (61)..(61): /note="Nucleotide may be methylated to form 5-methylcytosine"
tcaccccagcacatgtgtgacagatggtgaaagctcaatatatgaatgaatgttgaatgacggaatctactacctgatgggccagtctattccacctttgaacattgccaattttaagaaca

SEQ ID NO: 13990 - DNA, 122 bp, Homo sapiens
  misc_feature (61)..(62): /note="This region represents a CpG dinucleotide"
  misc_feature (61)..(61): /note="Nucleotide may be methylated to form 5-methylcytosine"
actgtgttgcctttccacctgcctaaaagaagcagcttagggtcatgactcagggagaggcggttagacaagtccaataatacaacttgtttaggggatggagggacccagcctgaggccct

SEQ ID NO: 13991 - DNA, 122 bp, Homo sapiens
  misc_feature (61)..(62): /note="This region represents a CpG dinucleotide"
  misc_feature (61)..(61): /note="Nucleotide may be methylated to form 5-methylcytosine"
ggcactaacaattgtgtaggtgtggatgaatatggtgtggatgaatatgccagtggtggtcgcctaagtgctccagtgtgaataaacagagtgcctctgagagaatgagtggagtctattag

SEQ ID NO: 13992 - DNA, 122 bp, Homo sapiens
  misc_feature (61)..(62): /note="This region represents a CpG dinucleotide"
  misc_feature (61)..(61): /note="Nucleotide may be methylated to form 5-methylcytosine"
aagctctggttaacgtaaccctcaggacagctcaagaaattcttgcactgtgctttcccacgtacatttcagtgtacaggctgtgtacctgtggctgtttatcaggttcatcttctttagca

SEQ ID NO: 13993 - DNA, 122 bp, Homo sapiens
  misc_feature (61)..(62): /note="This region represents a CpG dinucleotide"
  misc_feature (61)..(61): /note="Nucleotide may be methylated to form 5-methylcytosine"
atgactagtgcaggtccagtagcaattgccaggggcgtgccttgggcagatgagcttaagcgaggtcactaaattaatcatcagaaaggggtggtaccaggacttagactaatcagtagtca

SEQ ID NO: 13994 - DNA, 122 bp, Homo sapiens
  misc_feature (61)..(62): /note="This region represents a CpG dinucleotide"
  misc_feature (61)..(61): /note="Nucleotide may be methylated to form 5-methylcytosine"
aaaaccgtggcagtaagagatgcctttctctggcacatcccacctgctgggcataagcggcgccaccctctggagttacagcctcaaggcagtccggtaactaatcaggctttgggatggag

SEQ ID NO: 13995 - DNA, 122 bp, Homo sapiens
  misc_feature (61)..(62): /note="This region represents a CpG dinucleotide"
  misc_feature (61)..(61): /note="Nucleotide may be methylated to form 5-methylcytosine"
atgaaaattaaatatgacttagaagcattgatttatgaaggcttatgatgtcatcggtttcgacagaaagcaaactccagcaggctgtgagcctacagggagttgacccagaaacatgcatg

SEQ ID NO: 13996 - DNA, 122 bp, Homo sapiens
  misc_feature (61)..(62): /note="This region represents a CpG dinucleotide"
  misc_feature (61)..(61): /note="Nucleotide may be methylated to form 5-methylcytosine"
aaggctggggatcctggtgtcctgtcttacaggtgcaagcatagatgagagtcctggccacgcctgccattcaggcagaaaggctctgctaccaagaatcagaaatcaagttctttcgtagt

SEQ ID NO: 13997 - DNA, 122 bp, Homo sapiens
  misc_feature (61)..(62): /note="This region represents a CpG dinucleotide"
  misc_feature (61)..(61): /note="Nucleotide may be methylated to form 5-methylcytosine"
caggaaccaggggtgccccaggccctgttttgttttgccaaatgagggacttaatgagtgcggccagttcagactttgctggccttggcacttagaaaaacttgctcggggccctgcctggg

SEQ ID NO: 13998 - DNA, 122 bp, Homo sapiens
  misc_feature (61)..(62): /note="This region represents a CpG dinucleotide"
  misc_feature (61)..(61): /note="Nucleotide may be methylated to form 5-methylcytosine"
aggctggagggcagaggcacattcacggctcactgcagccttgaccttctgggctcaagacgaagaaattggggattggcttaagtaattgcccaagtaattgcttaagtaattgcccaagt

SEQ ID NO: 13999 - DNA, 122 bp, Homo sapiens
  misc_feature (61)..(62): /note="This region represents a CpG dinucleotide"
  misc_feature (61)..(61): /note="Nucleotide may be methylated to form 5-methylcytosine"
ctagacagaagggagaagtcacaccaatcaattcccaaaagcctgtaagcaggctgcagtcgctagacaaccaacaaagttgtctggcaggataatgcatattagccttgcctaaagactcc

SEQ ID NO: 14000 - DNA, 122 bp, Homo sapiens
  misc_feature (61)..(62): /note="This region represents a CpG dinucleotide"
  misc_feature (61)..(61): /note="Nucleotide may be methylated to form 5-methylcytosine"
ggtgcattagacaagccctggaatgacagccagaagatctctattctgatcctggccctccgtctacttgggccactttgatcaagccatttagccccgttcccttcaggtggctcagctgg
